(19) United States
(12) Patent Application Publication
(10) Pub. No.: US 2020/0181618 A1
(43) Pub. Date: Jun. 11, 2020

(54) FLUOROGEN-BINDING RNA APTAMERS

(71) Applicants: CENTRE NATIONAL DE LA RECHERCHE SCIENTIFIQUE, Paris (FR); UNIVERSITÉ DE STRASBOURG, Strasbourg (FR); SIMON FRASER UNIVERSITY, Burnaby (CA); THE UNITED STATES OF AMERICA, AS REPRESENTED BY THE SECRETARY, DEPARTMENT OF HEALTH AND HUMAN SERVIC, Rockville, MD (US)

(72) Inventors: Michael Ryckelynck, Strasbourg (FR); Alexis Autour, Gif-sur-Yvette (FR); Peter Unrau, North Vancouver (CA); Elena Dolgosheina, Vancouver (CA); Sunny Chiu Yuk Jeng, Burnaby (CA); Shanker Shyam Sundhar Panchapakesan, West Haven, CT (US); Amir Abdolahzadeh, Maple Ridge (CA); Razvan Cojocaru, Port Coquilam (CA); Adrian Ferré D'Amaré, Bethesda, MD (US); Robert Trachman, Silver Spring, MD (US)

(73) Assignees: CENTRE NATIONAL DE LA RECHERCHE SCIENTIFIQUE, Paris (FR); UNIVERSITÉ DE STRASBOURG, STRASBOURG (FR); SIMON FRASER UNIVERSITY, Burnaby, BC (CA); THE UNITED STATES OF AMERICA, AS REPRESENTED BY THE SECRETARY, DEPARTMENT OF HEALTH AND HUMAN SERVIC, Rockville, MD (US)

(21) Appl. No.: 16/608,127

(22) PCT Filed: Apr. 23, 2018
(86) PCT No.: PCT/IB2018/052808

§ 371 Date: Oct. 24, 2019

Related U.S. Application Data
(60) Provisional application No. 62/489,346, filed on Apr. 24, 2017.

(51) Int. Cl. C12N 15/115

(52) U.S. Cl. CPC C12N 15/115; C12N 2310/16; C12N 2320/10

(57) ABSTRACT

RNA aptamers are disclosed with distinct fluorescent properties, fluorophore binding affinities, and salt dependence. Also disclosed are corresponding fluorophores, with selected fluorophores evidencing high cellular permeability. The aptamer's high fluorophore affinities, the high brightness of the bound complexes, and their thermal and salt stability, provide distinct aspects of the disclosed aptamers.

### FIELD

[0001] The invention is in the field of nucleic acid biochemistry, providing RNA aptamers that bind heterocyclic fluorophores, adapted for use in measuring or testing processes that include fluorogenic hybridization assays.

### BACKGROUND

[0002] RNA plays many important roles in cellular biology. However, directly imaging biologically important RNAs has been hindered by a lack of fluorescent tools equivalent to the fluorescent proteins available to study cellular proteins.

[0003] Preferably, RNA labelling systems should preserve biological function, have photophysical properties similar to existing fluorescent proteins, and be compatible with established live and fixed cell protein labelling strategies.

[0004] Since their creation, fluorogenic RNA aptamers that enhance the fluorescence of an unbound fluorophore have sparked significant interest and hold great potential, for example to enable the visualization of RNA molecules within a cell. However, their application has in some cases been limited due to their inability to fold into a correct tertiary structure that simultaneously binds a target fluorophore tightly and in an orientation that maximizes fluorescence (Dolgosheina, E. V. and Unrau, P. J. (2016), Fluorophore-binding RNA aptamers and their applications. WIREs RNA, 7: 843-851). Optimization of both fluorophore binding and bound complex brightness is desirable for fluorescent RNA imaging tags, particularly for the study of cellular RNAs.

### SUMMARY

[0005] Aptamers are disclosed with distinct fluorescent properties, fluorophore binding affinities, and salt dependence, with specific embodiments designated herein Mango-II, III and IV. Also disclosed are corresponding fluorophores, with selected fluorophores evidencing high cellular permeability. The aptamer's high fluorophore affinities, the high brightness of the bound complexes, and their thermal and salt stability, provide distinct aspects of the disclosed aptamers. The aptamers may accordingly be adapted to work with existing microscope methodologies optimized for the study of proteins. Aspects of the present innovation accordingly involve the use of the disclosed aptamers to study RNA function and dynamics both in vitro and in vivo. Exemplified embodiments have been used for imaging RNA molecules in fixed and live mammalian cells. In particular, the examples herein illustrate that the disclosed aptamers can accurately image the sub-cellular localization of two small non-coding RNAs (5S and U6) in both fixed and live cells. Selected aptamers are shown herein to be as bright or brighter than enhanced GFP when bound to TO1-Biotin.

### INVENTION

[0006] The invention relates to a RNA aptamer comprising an active core sequence as set forth in:

(SEQ ID NO: 2)
5′- GG@(T₁/WGW)GG(#₁H/WG)WGGN@(#₂/-)G(T₂/H)GNH
(AN@T₃/G)-3′

[0007] with the proviso that the active core sequence is not the sequence as set forth in SEQ ID NO: 1: GAAGGGACGGUGCGGAGAGGAGA.

[0008] wherein, within the active core sequence
[0009] represents no nucleotide (gap);
[0010] K represents U or G;
[0011] S represents C or G;
[0012] R represents A or G;
[0013] W represents A or U;
[0014] H represents A, C or U;
[0015] N represents A, C, G or U; and
[0016] @ represents N or no nucleotide;
[0017] wherein /, between the brackets ( ), represents an alternative;

[0018] and wherein T₁ represents any nucleotide, T₂ and T₃ being defined as follows:
[0019] when T₁ is A, T₂ can be either A, G or U; and
   [0020] when T₁ is A and T₂ is A, then T₃ is U;
   [0021] when T₁ is A and T₂ is G, then T₃ is U; and
   [0022] when T₁ is A and T₂ is U, then T₃ is A or U; or

[0023] when T₁ is C, T₂ can be either G or U; and
[0024] when T₁ is C and T₂ is G, then T₃ is C or G; and
[0025] when T₁ is C and T₂ is U, then T₃ is G; or

[0026] When T₁ is G, T₂ can be either G or C, and T₃ is C; or

[0027] When T₁ is U, T₂ can be either A or C; and
[0028] when T₁ is U and T₂ is A, then T₃ is A or U; and
[0029] when T₁ is U and T₂ is C, then T₃ is A;

[0030] wherein #₁ and #₂ represents any nucleotide pair such that
[0031] when #₁ is A, then #₂ represents A, C, G or U; or
[0032] when #₁ is C, then #₂ is C; or
[0033] When #₁ is G, then #₂ is G; or
[0034] when #₁ is U, then #₂ represents A, G or U.

[0035] wherein #₁ and #₂ represents any nucleotide pair such that
[0036] when #₁ is A, then #₂ represents A, C, G or U; or
[0037] when #₁ is C, then #₂ is C; or
[0038] When #₁ is G, then #₂ is G; or
[0039] when #₁ is U, then #₂ represents A, G or U.

[0040] wherein the aptamer adopts a determined tridimensional conformation which is a fluorophore binding conformation, said aptamer when it adopts the fluorophore binding conformation being liable to interact with a fluorophore; wherein the aptamer further comprises, contiguous with the active core sequence, a 5′ leader sequence attached, or operably linked to (by covalent bound, i.e. phosphodiester bound), to the 5′ terminus of the active core and a 3′ tail sequence attached, or operably linked to (by covalent bridge mentioned below), to the 3′ terminus of the active core, wherein the 5′ leader sequence and the 3′ tail sequence together mediate the juxtaposition of the 5′ terminus of the active core and the 3′ terminus of the active core when the aptamer is the fluorophore binding conformation.

[0041] The invention is based on the identification by the inventors of nucleic acid molecules having a determined structure that adopts a specific conformation (binding conformation) to interact with fluorophore compounds to form a fluorophore-aptamer complex. When the interaction occurs, the fluorescence of the fluorophore significantly increases compared to the fluorescence of the fluorophore that does not form a complex with the aptamer complex.

[0042] Advantageously, the sequence of the aptamer as defined above encompasses the two following sequences

(SEQ ID NO: 3)
5′- GG@(T₁)GG(#₁H)WGGN@ (#₂)G(T₂)GNH(AN@T₃)-3′;
and
(SEQ ID NO: 4)
5′- GG@(WGW)GG(WG)WGGN@G(H)GNH(G)-3′.

[0043] The aptamer, in its binding conformation, forms a G-quadruplex and appears like an hairpin.

[0044] Advantageously, the invention relates to the aptamer as defined above, wherein said aptamer can interact with a fluorophore, said fluorophore being selected from a group consisting of the following compounds of the following Formula I and Formula II:

[chemical structure]

[0045] wherein:
[0046] X represents O, S, Se, or C(CH₃)ₙ;
[0047] R₁ represents an alkyl having from 1-6 carbons;
[0048] R₂ represents an alkyl having from 1-6 carbons;
[0049] R₃ is either a fused benzene, an alkyl having 1-6 carbons, a methoxy or H;
[0050] R₄ is an alkyl having 1-6 carbons, a methoxy or H; and
[0051] n=zero or an integer from 1-6;

[chemical structure]

[0052] wherein:
[0053] R₁ represents any substituent;
[0054] R₂ through R₅ represent H, F, Cl, Br, I, CH₃, linear polymers, or extended heterocycles
[0055] R₆-R₉ represent H, F, Cl, Br, I, CH₃, linear polymers, or extended heterocycles
[0056] R₁₀ represents H, F, Cl, Br, I, CH₃, linear polymers, or extended heterocycles.
[0057] R₁₁ through R₁₂ represent H, F, Cl, Br, I, CH₃, linear polymers, or extended heterocycles
[0058] X represents the following atoms O, S and Se; and
[0059] n is 1 or 3 or 5.

[0060] Advantageously, the RNA aptamer as defined above has a fluorophore binding affinity of at least 0.5 μM when the active core is in a fluorophore binding conformation.

[0061] More advantageously, the binding of the fluorophore of formula I or II by the RNA aptamer, as defined above, in the fluorophore binding conformation, increases the fluorescence of the fluorophore of formula I or II, and the fluorophore-aptamer complex has a brightness of at least 5,000 M⁻¹ cm⁻¹.

[0062] Advantageously, the invention relates to the RNA aptamer as defined above, wherein the fluorophore complex has a brightness of at least 6,000, or at least 7,000, or at least 8,000, or at least 9,000, or at least 10,000, or at least 11,000 M⁻¹ cm⁻¹.

[0063] Advantageously, the invention relates to the RNA aptamer as defined above, wherein the core active sequence comprises the following sequence:

(SEQ ID NO: 5)
5′-$₁GGNT₁GG#₁HUGGHA#₂GT₂GNHAN@T₃$₂-3′

[0064] wherein:

[0065] H represents A, C or U

[0066] N represents A, C, G or U

[0067] @ represents any nucleotide or no nucleotide

[0068] #₁ and #₂ represents any nucleotide pair such that
[0069] when #₁ is A, then #₂ represents A, C, G or U; or
[0070] when #₁ is C, then #₂ is C; or
[0071] When #₁ is G, then #₂ is G; or
[0072] when #₁ is U, then #₂ represents A, G or U.

[0073] $₁ and $₂ represent any pair of nucleotides such that
[0074] when $₁ is A, then $₂ is A, G or U; or
[0075] when $₁ is C, then $₂ is A, G or U; or
[0076] when $₁ is G, then $₂ is A, C, G or U; or
[0077] when $₁ is U, then $₂ is A, G.

[0078] wherein the 5′ and 3′ external sequence forms a helix that is substantially base paired.

[0079] Advantageously, the invention relates to The RNA aptamer defined above, wherein the core active sequence comprises the following sequence:

(SEQ ID NO: 6)
GG@WGWGGWGWGGN@GHGGHG

[0080] wherein:
[0081] W represents A or U;
[0082] H represents A, C or U;
[0083] N represents A, C, G or U; and
[0084] @ represents N or no nucleotide.

[0085] Advantageously, the invention relates to the RNA aptamer as defined above, wherein the core active sequence comprises the following sequence:

(SEQ ID NO: 7)
GAA(GG)₁AA(GG)₂NUU(GG)₃UAN′G₄ᵢUG₄ᵢᵢGUAUAUUC

[0086] wherein:

[0087] N is any nucleotide, N′ the anti-watson crick partner to N

[0088] wherein (GG)₁, (GG)₂, (GG)₃ and G₄ᵢ and G₄ᵢᵢ form a quadruplex structure when the active core is in the fluorophore binding conformation, with the 5′ terminus of the active core being juxtaposed to the 3′ terminus of the active core.

[0089] Advantageously, the invention relates to the RNA aptamer as defined above, wherein the core active sequence comprises the following sequence:

(SEQ ID NO: 8)
[G/C]NR(GG)₁[R/D]AG[A/U](GG)₂NGN(GG)₃A*[A/U/D]GA*
(GG)₄[A/C]R[A/D]

[0090] wherein:

[0091] A* is A or N,

[0092] N is any nucleotide

[0093] R is a purine,

[0094] D denotes the absence of nucleotide,

[0095] wherein (GG)₁, (GG)₂, (GG)₃ and (GG)₄ form a quadruplex structure when the active core is in the fluorophore binding conformation, with the 5′ terminus of the active core being juxtaposed to the 3′ terminus of the active core.

[0096] More advantageously, the invention relates to the RNA aptamer as defined above, wherein the core active sequences comprises one of the sequences as set forth in SEQ ID NO: 9 to SEQ ID NO: 6829, preferably as set forth in SEQ ID NO: 9 to SEQ ID NO: 6887.

[0097] In another advantageous embodiment, the aptamer according to the invention comprises or consists essentially of or consists of one of the sequences as set forth in SEQ ID NO: 6830 to SEQ ID NO: 6875 (Mango III) or as set forth in SEQ ID NO: 6876 to SEQ ID NO: 6887 (Mango II).

[0098] Advantageously, the invention relates to the RNA aptamer comprising a core active sequence as defined above, with the proviso that said aptamer active core does not have the core sequence: GNR(GG)₁GNN(GG)₂NGN(GG)₃AGN(GG)₄AGA SEQ ID NO 6888, wherein R is a purine, and N is any nucleotide.

[0099] Advantageously, the invention relates to the RNA aptamer according to the above definition, wherein the 5′ leader sequence and the 3′ tail sequence are complementary, so that binding of the 5′ leader sequence to the 3′ tail sequence mediates the juxtaposition of the 5′ terminus of the active core and the 3′ terminus of the active core when the aptamer is the fluorophore binding conformation.

[0100] More advantageously, the invention relates to the RNA aptamer according to the above definition, wherein the 5′ leader sequence and the 3′ tail sequence are complementary to a target sequence, the target sequence comprising:

[0101] a leader bait sequence that is complementary to the 3′ tail sequence of the aptamer; and

[0102] a tail bait sequence that is complementary to the 5′ leader sequence of the aptamer;

[0103] the leader and tail bait sequences being juxtaposed in the target sequence, so that binding of:

[0104] binding of the 3′ tail sequence to the 5′ leader bait sequence;

[0105] mediates the juxtaposition of the 5′ terminus of the active core and the 3′ terminus of the active core when the aptamer is in the fluorophore binding conformation.

[0106] More advantageously, the invention relates to the RNA aptamer as defined above, wherein the leader and tail bait sequences being contiguous in the target sequence.

[0107] More advantageously, the invention relates to the RNA aptamer according to the above definition, wherein juxtaposition of the 5′ terminus of the active core and the 3′ terminus of the active core when the aptamer is the fluorophore binding conformation brings a phosphate group from the 5′ terminus to within 10 Å, or to within 9 Å or to within 8 Å, of a phosphate group from the 3′ terminus.

[0108] More advantageously, the invention relates to the RNA aptamer according to the above definition, wherein the aptamer has a fluorophore binding affinity of at least 400 nM, 300 nM, 200 nM, 100 nM, 50 nM, 40 nM, 30 nM, 20 nM, 10 nM, 5 nM, 1 nM or 0.5 nM when the core is in a fluorophore binding conformation.

[0109] More advantageously, the invention relates to the RNA aptamer according to the above definition, wherein the fluorophore-aptamer complex has a brightness of at least 7,000 M⁻¹ cm⁻¹, 8,000 M⁻¹ cm⁻¹, 9,000 M⁻¹ cm⁻¹, 10,000 M⁻¹ cm⁻¹, or 43,000 M⁻¹ cm⁻¹.

[0110] More advantageously, the invention relates to the RNA aptamer according to the above definition, wherein the fluorophore-aptamer complex has a fluorescent lifetime of at least 1 ns, or at least 2 ns, or at least 3 ns, or at least 4 ns or at least 5 ns, or at least 6 ns, or in the range of 1-6 ns, i.e. 1, or 2, or 3 or 4, or 6 or 6 ns.

[0111] More advantageously, the invention relates to the RNA aptamer according to the above definition, wherein the fluorophore-aptamer complex is fluorescent in a formaldehyde solution.

[0112] In another advantageous embodiment, the invention relates to the RNA aptamer according to the above definition, wherein the secondary aptamer sequence has affinity for a secondary target moiety.

[0113] The invention also relates to an RNA aptamer comprising an active core sequence, wherein the aptamer has a fluorophore binding affinity of at least 0.5 μM when the active core is in a fluorophore binding conformation, wherein the active core has a 5′ terminus and a 3′ terminus, and wherein the active core sequence from the 5′ terminus to the 3′ terminus is one of:
[0114] Active Core I:

(SEQ ID NO: 8)
[G/C]NR(GG)₁{RAGU/AG[A/U]/GNN}(GG)₂NGN(GG)₃A*
[A/U/D]GA*(GG)₄[A/C]R[A/D]

[0115] wherein within the { } the first two blocks are optionally RRG[A/U]
[0116] or Active Core II

(SEQ ID NO: 7)
GAA(GG)₁AA(GG)₂AUU(GG)₃UAUGU(GG)₄UAUAUUC

[0117] wherein:
[0118] A* is A or N,
[0119] N is any nucleotide,
[0120] R is a purine,
[0121] D denotes the absence of a residue,
[0122] wherein G₁, G₂, G₃ and G₄ form a quadruplex structure when the active core is in the fluorophore binding conformation, with the 5′ terminus of the active core being juxtaposed to the 3′ terminus of the active core; and,

[0123] wherein the fluorophore is a compound of Formula I or Formula II

[chemical structure]

[0124] wherein substituents in Formula I are defined as follows:
[0125] X=O, S, Se, or C(CH₃)ₙ;
[0126] R₁=alkyl having from 1-6 carbons;
[0127] R₂=alkyl having from 1-6 carbons;
[0128] R₃=fused benzene, alkyl having 1-6 carbons, methoxy or H;
[0129] R₄=alkyl having 1-6 carbons, methoxy or H; and
[0130] n=zero or an integer from 1-6.

[0131] wherein substituents in Formula II are defined as follows:

| R₁ | Any substituent |
|---|---|
| R₂ through R₅ | H, F, Cl, Br, I, CH₃, linear polymers, |
| | or extended heterocycles |
| R₆-R₉ | H, F, Cl, Br, I, CH₃, linear polymers, |
| | or extended heterocycles |
| R₁₀ | H, F, Cl, Br, I, CH₃, linear polymers, |
| | or extended heterocycles. |
| R₁₁ through R₁₂ | H, F, Cl, Br, I, CH₃, linear polymers, |
| | or extended heterocycles |
| X atoms | O, S, Se |
| n | 1 or 3 or 5 |

[0132] wherein binding of the fluorophore by the aptamer in the fluorophore binding conformation increases the fluorescence of the fluorophore, and the fluorophore-aptamer complex has a brightness of at least 12,000 M⁻¹ cm⁻¹;
[0133] wherein the aptamer further comprises, contiguous with the active core sequence, a 5′ leader sequence attached to the 5′ terminus of the active core and a 3′ tail sequence attached to the 3′ terminus of the active core, wherein the 5′ leader sequence and the 3′ tail sequence together mediate the juxtaposition of the 5′ terminus of the active core and the 3′ terminus of the active core when the aptamer is the fluorophore binding conformation.

[0134] The invention also relates to an RNA aptamer comprising an active core sequence, wherein the aptamer has a fluorophore binding affinity of at least 0.5 μM when the active core is in a fluorophore binding conformation, wherein the active core has a 5′ terminus and a 3′ terminus, and wherein the active core sequence from the 5′ terminus to the 3′ terminus is one of:
[0135] Active Core I:

(SEQ ID NO: 8)
[G/C]NR(GG)₁{RAGU/AG[A/U]/GNN}(GG)₂NGN(GG)₃A*
[A/U/D]GA*(GG)₄[A/C]R[A/D]

[0136] wherein within the { } the first two blocks are optionally RRG[A/U]
[0137] or Active Core II

(SEQ ID NO: 7)
GAA(GG)₁AA(GG)₂AUU(GG)₃UAUGU(GG)₄UAUAUUC

[0138] wherein:
[0139] A* is A or N,
[0140] N is any nucleotide,
[0141] R is a purine,
[0142] D denotes the absence of a residue,
[0143] wherein (GG)₁, (GG)₂, (GG)₃ and (GG)₄ form a quadruplex structure when the active core is in the fluorophore binding conformation, with the 5′ terminus of the active core being juxtaposed to the 3′ terminus of the active core; and,

[0144] wherein the fluorophore is a compound of Formula I or Formula II

[chemical structure]

[0145] wherein substituents in Formula I are defined as follows:
[0146] X=O, S, Se, or C(CH₃)ₙ;
[0147] R₁=alkyl having from 1-6 carbons;
[0148] R₂=alkyl having from 1-6 carbons;
[0149] R₃=fused benzene, alkyl having 1-6 carbons, methoxy or H;
[0150] R₄=alkyl having 1-6 carbons, methoxy or H; and
[0151] n=zero or an integer from 1-6.

[0152] wherein substituents in Formula II are defined as follows:

| R₁ | Any substituent |
|---|---|
| R₂ through R₅ | H, F, Cl, Br, I, CH₃, linear polymers, |
| | or extended heterocycles |
| R₆-R₉ | H, F, Cl, Br, I, CH₃, linear polymers, |
| | or extended heterocycles |
| R₁₀ | H, F, Cl, Br, I, CH₃, linear polymers, |
| | or extended heterocycles. |
| R₁₁ through R₁₂ | H, F, Cl, Br, I, CH₃, linear polymers, |
| | or extended heterocycles |
| X atoms | O, S, Se |
| n | 1 or 3 or 5 |

[0153] wherein binding of the fluorophore by the aptamer in the fluorophore binding conformation increases the fluorescence of the fluorophore, and the fluorophore-aptamer complex has a brightness of at least 5,000 M⁻¹ cm⁻¹;
[0154] wherein the aptamer further comprises, contiguous with the active core sequence, a 5′ leader sequence attached to the 5′ terminus of the active core and a 3′ tail sequence attached to the 3′ terminus of the active core, wherein the 5′ leader sequence and the 3′ tail sequence together mediate the juxtaposition of the 5′ terminus of the active core and the 3′ terminus of the active core when the aptamer is the fluorophore binding conformation;
[0155] wherein the 5′ leader sequence and the 3′ tail sequence are complementary to a target sequence, the target (bait) sequence comprising:
   [0156] a leader bait sequence that is complementary to the 3′ tail sequence of the aptamer; and,
   [0157] a tail bait sequence that is complementary to the 5′ leader sequence of the aptamer;
[0158] the leader and tail bait sequences being juxtaposed in the target sequence, so that binding of:
   [0159] the 5′ leader sequence to the tail bait sequence; combined with, binding of the 3′ tail sequence to the leader bait sequence;
   [0160] mediates the juxtaposition of the 5′ terminus of the active core and the 3′ terminus of the active core when the aptamer is the fluorophore binding conformation.

[0161] Advantageously, the invention relates to the RNA aptamer as defined above, wherein the 5′ leader bait and 3′ tail bait sequences are contiguous in the target sequence.

[0162] The invention also relates to a molecular complex comprising, or consisting essentially of:
[0163] an RNA aptamer as defined above; and
[0164] a fluorophore selected from group consisting of the following compounds of the following Formula I and Formula II.

[0165] More advantageously, the invention relates to the molecular complex as defined above, wherein the fluorophore is chosen from the group consisting of the following compounds, where X=O, S or Se, and n=1, 3, or 5:

[chemical structure]

[chemical structure]

[0166] wherein R₁ is,

[chemical structure]

[0167] The invention will be better explained in the following figures and examples.

### BRIEF DESCRIPTION OF THE DRAWINGS

[0168] FIG. 1|Selection of TO1-Biotin binding variants using droplet-based microfluidics fluorescence screening in the presence of competitors. (a) Experimental workflow for microfluidic-assisted fluorescence screening. Ovals and boxes represent on- and off-chip steps, respectively. Three microfluidic devices were used for gene individualization in 2.5 pL droplets containing PCR mixture; after thermocycling, fusing each PCR droplet with a droplet containing an in vitro transcription (IVT) mixture supplemented with TO1-Biotin and competitor (NMM or TO3-Biotin); and, after incubation, the fluorescence profile of each droplet was analysed and sorted accordingly. (b) Fluorescence profile of droplets containing Mango I or the initial R12 library (˜200,000 variants, Supplementary Table 1). Droplets containing no DNA yield a population of empty (initially) was found to have a fluorescence of 10 RFUs. (c) Improvement in fluorescence enhancement of aptamer libraries during the screening process in the presence of increasing amounts of NMM. The fluorescence (black dots) of the RNA libraries in complex with TO1-Biotin was determined by mixing 2 μM RNA and 100 nM TO1-Biotin in the absence of NMM. These values were normalized to that of the starting library (R12). (d) Enhancement in fluorescence resulting from selection with TO3-Biotin competitor. The fluorescence (black circles) was determined after each round by mixing 300 nM RNA and 100 nM TO1-Biotin in the absence of TO3-Biotin. The values were normalized to that of the starting library (R12). The blue bars represent the concentration of competitor used in each round of selection. For each sort, the gated populations can be found in FIG. 5.

[0169] FIG. 2|RNA Mango I, II, III and IV core sequences and their properties. (a) Color coded alignment of RNA Mango I, II, III and IV. G residues in yellow are protected from DMS cleavage (data from panel d) when folded in the presence of fluorophore. Quadruplex stacks and their associated propeller sequences are numbered 1 through 4. The GAAA isolation motif of Mango I, together with two adenines essential for binding, are shown in green and red respectively. Purple shading represents a flanking stem region common for all four Mango aptamers. Schematic: A tertiary structure schematic of Mango I, showing tier 1, 2 and 3 of its quadruplex structure (T1, T2 and T3) and color-coded as in (a). TO1-Biotin is shown in green. Bottom: Top view of the Mango I core (PBD ID: 5V3F), showing the T3 tier of the quadruplex and relevant propeller residues, color coding matches the schematic and panel a. (b) Fluorescence binding curves for each Mango aptamer determined by titrating RNA aptamer concentration while holding TO1-Biotin fluorophore constant at 10 nM. K_{D} values are shown next to each titration. (c) Same as for panel b but using 20 nM TO3-Biotin. Data for panels b and c have been normalized such that Mango I has a maximum fluorescence of 1. Error bars are standard deviation of three replicates. (d) DMS chemical protection patterns for the four Mango aptamers. 3′ end-labelled RNA (terminal ³²pCp shown as a black asterisk) was subjected to DMS chemical modification followed by reduction by NaBH₄ and aniline cleavage as described in the methods. RNA sequences are displayed to the right of each set of lanes with stem portions represented as purple blocks. Legend: T1—denatured T1 ladder; OH—partial alkaline hydrolysis ladder; (−) DMS—denatured reaction with ddH₂O added in place of DMS; 80° C. DMS—denatured DMS ladder; remaining lanes are native DMS reactions with addition of potassium to 140 mM final (+KCl), addition of sodium to 140 mM final (+NaCl), with or without 500 nM TO1-Biotin (+TO1-Biotin). Red asterisk indicates a notably unprotected G. Red daggers in Mango II and Mango IV indicate nucleotides that favor looping out of the core before returning with a G that participates in completing the first G stack (in contrast to Mango I that prefers three Gs in a row for a stack).

[0170] FIG. 3|Cellular imaging of Mango IV tagged RNAs. (a) Maximum projections of fixed cells containing Mango IV tagged 5S and U6 RNAs stained with 200 nM TO1-biotin (Yellow) and 1 mg/ml Hoechst 33258 (Blue). (b) Mean intensity distributions of 5S-Mango IV and U6-Mango IV Foci (Yellow) compared to controls (Black). Fraction of foci observed in the cytoplasm and nucleus for 5S and U6-Mango IV RNAs (bottom panel, * denotes p<0.05 and ** means p<0.01). (c) Cytoplasmic 5S-Mango IV foci localize with immunostained mitochondria (ATP5B), whereas cytoplasmic U6-Mango foci do not. Normalized fluorescence intensities as a function of distance along the inset white lines (bottom panels). (d) Localization of 5S-Mango IV and U6-Mango IV relative to immunostained Ribosomes (RP-S6), Mitochondria (ATP-5B) and snRNPs (LSm3). (e) Localization of 5S-Mango IV and U6-Mango IV foci relative to immunostained P-Bodies (GW182), Endosomes (EEA-1) and Stress Granules (TIA-1). Scale bars are 10 μm. All images are maximum projections except in c, which show a single focal plane.

[0171] FIG. 4|Effect of N-methyl mesoporphyrin IX (NMM) concentration on TO1-biotin/Mango I fluorescence. RNA aptamer at 1 μM was incubated with 100 nM of TO1-Biotin and a concentration of NMM ranging from 0 to 5 μM. Green fluorescence was recorded (ex: 492 nm/em: 516 nm) in a real-time thermocycler (Mx 3005P, Agilent). Values are normalized to that of the 0 μM NMM point and are the mean of two independent experiments and error bars correspond to ±1 standard error.

[0172] FIG. 5|Green fluorescence profile of the screenings performed in the presence of NMM and TO3-Biotin. (a) NMM. (b) TO3-Biotin. The green fluorescence of 50,000 droplets was used to build each profile. Red bars indicate the limit over which droplets were gated and sorted as positive. The selection conditions (TO1-Biotin and NMM/TO3-Biotin concentrations as well as the temperature of the analysis device) are indicated. In TO3-Biotin screening, b.xi corresponds to the same experiment as b.x but the fluorescence was recorded at 25° C.

[0173] FIG. 6|Resistance or selectivity of TO1-Biotin binding variants in presence of competitors after each round of screening. (a) NMM resistance selection: Resistance of TO1-Biotin/RNA complexes to NMM. The fluorescence of the complex between TO1-Biotin and the RNAs from the libraries obtained after each round of screening was determined by mixing 2 μM RNA and 100 nM TO1-Biotin in the absence or in the presence of 3 μM NMM. The Resistance to NMM was calculated by normalizing the aptamer/TO1-Biotin fluorescence in the presence of NMM by the aptamer/TO1-Biotin fluorescence in the absence of NMM. (b) TO3-Biotin resistance selection: Resistance of TO1-Biotin/RNA complexes to TO3-Biotin. The fluorescence of the complex between TO1-Biotin and the RNAs from the libraries obtained after each round of screening was determined by mixing 300 nM RNA and 100 nM TO1-Biotin, in the absence or in the presence of 1.6 μM TO3-Biotin. The resistance to TO3-Biotin was calculated by normalizing the aptamer/TO1-Biotin fluorescence in the presence of TO3-Biotin by the aptamer/TO1-Biotin fluorescence in the absence of TO3-Biotin. (c) Selectivity of the libraries obtained after the different rounds of screening in the presence of TO3-Biotin. The green fluorescence of the TO1-Biotin/RNA complex was normalized to the red fluorescence of the TO3-Biotin/RNA complex to calculate the selectivity index. The blue bar indicates the concentration of competitor used during the screening step. Data was obtained at 25° C., the values are the mean of three independent experiments and error bars correspond to ±1 standard error.

[0174] FIG. 7|Analysis of the clones obtained at the end of the screening process performed in the presence of NMM. (a) Brightness of the complexes formed between TO1-Biotin and individual variants isolated from the screenings in the presence of NMM. Aptamer-coding genes were PCR amplified, in vitro transcribed in the presence of TO1-Biotin and the fluorescence was monitored at 37° C. The maximal fluorescence was normalized to that of Mango I. (b) Resistance of TO1-Biotin/RNA complex to NMM. TO1-Biotin fluorescence was monitored as in (a) in the absence or in the presence of 3 μM NMM. (c) Sequence analysis of the clones of interest. The sequences of the clones of interest (indicated by an asterisk in a and b) were aligned with Clustal X. The green boxes indicate Mango III (R5-NMM-20) and Mango IV (R5-NMM-5).

[0175] FIG. 8|Sequence analysis of the variants isolated across the rounds of screening performed in the presence of TO3-Biotin. The first green box indicates Mango II (R2-1). For comparison, the sequence of Mango III (R5-NMM-20) was also added and boxed in green. The families of sequences clustering together are labelled (A to E).

[0176] FIG. 9|Mutations and truncations of Mangos-II, III and IV. (a) Mango II constructs. (b) Mango IV constructs. (c) Mango III constructs. F_{E} is relative to the full-length construct, which was normalized to one. Constructs with binding affinities higher than the end point of titration are labeled ‘u.d.’ (undeterminable). The closing stem regions are highlighted in purple. Guanine residues protected from DMS cleavage in the named Mango constructs of the study (FIG. 2d) are highlighted in yellow.

[0177] FIG. 10|Salt dependence of new Mango variants. Dependence of fluorescence of each Mango for (a) K⁺, (b) N^{a} in place of K⁺, and (c) Mg²⁺ ions in a buffer containing 140 mM K⁺. Each salt was titrated holding 25 nM RNA and 50 nM TO1-Biotin constant. 10 mM Tris buffer (pH 7.2) was used in place of phosphate of the WB buffer to avoid monovalent counter ions. Color-coding is as follows: Black—Mango I, Blue—Mango II, Green—Mango III, Orange—Mango IV. When possible, data is fitted to the Hill equation and Hill coefficients are listed in Table 1. Hill coefficients are fitted to dark points. Points in lighter shade have been excluded from the fit. Error bars are standard deviations of three replicates.

TABLE 1
Hill coefficients of RNA Mango/TO1-Biotin complexes

| | Hill Coefficients | | K_{D} (mM) | |
|---|---|---|---|---|
| | K⁺ | Na⁺ | K⁺ | Na⁺ |
| Mango-I | 1.2 ± 0.1 | N/A | 48 ± 5 | N/D |
| Mango-II | 1.4 ± 0.2 | 0.8 ± 0.1 | 39 ± 10 | 170 ± 110 |
| Mango-III | 1.0 ± 0.8* | 0.5 ± 0.5 | 0.4 ± 0.1 | 0.8 ± 0.3 |
| Mango-IV | 1.5 ± 0.2* | N/A | 64 ± 24 | N/D |

Errors are the standard deviation of three independent measurements.
*Hill coefficients with an asterisk are estimated based on initial rise of fluorescence data.

[0178] FIG. 11|Temperature-dependent fluorescent and UV absorbance spectroscopy of new Mango variants. Line plots of temperature-dependent spectroscopy for Mango I (data obtained from previous work)¹, Mango II, Mango III, and Mango IV. Left panels: 1 μM RNA was incubated with 5 μM TO1-Biotin and subjected to temperature ramps while monitoring fluorescence (red shades). Right panels: A₂₆₀ for this sample with 5 μM TO1-Biotin (green shades) and without TO1-Biotin (blue shades) were collected and the simple derivative plotted together with the derivative of the fluorescence data. Starting at 90° C., temperature was ramped down at a rate of 1° C./min to 20° C. (darker shade) and returned to 90° C. at a rate of 1° C./min (lighter shade).

[0179] FIG. 12|Circular dichroism spectra. Circular dichroism spectra of Mango I, II, III, and IV. 5 μM RNA was measured in 10 mM Tris pH 7.5 buffer either alone, with 140 mM monovalent salt, and/or with 7 μM TO1-Biotin as indicated by the legend. Data is a line plot to guide the eye.

[0180] FIG. 13|Photophysics: excitation/emission. (a) Excitation (dark curve) and emission (light curve) spectra of each Mango. All Mangos have λₑₓ max=510 nm and λₑₘ max=535 nm. Color-coding is as follows: Black—Mango I, Blue—Mango II, Green—Mango III, Red—Mango IV.

[0181] FIG. 14|RNA scaffold diagrams. Diagrams of the 5S-Mango and U6-Mango constructs synthesized (sequences in Table 2) and their fluorescence emission as a function of wavelength after excitation at 505 nm, compared to unmodified Mango I-IV.

TABLE 2
Constructs used in in vivo experiments

| | | SEQ |
|---|---|---|
| | | ID |
| Construct | Sequence | NO: |
| 5S-30- | GTCTACGGCC ATACCACCCT GAACGCGCCC | 6889 |
| Control | GATCTCGTCT GATCTCGGAA GCTAAGCAGG | |
| | GTCGGGCCTG GTTAGTACTT GGATGGGAGA | |
| | CCGCCTGGGA ATACCGGGTG CTGTAGGCGT | |
| | CGACTTGCCA TGTGTATGTG GGGAAACCCA | |
| | CATACTCTGA TGATCCTTCG GGATCATTCA | |
| | TGGCAATCTA GA | |
| 5S-F30- | GTCTACGGCC ATACCACCCT GAACGCGCCC | 6890 |
| Mango II | GATCTCGTCT GATCTCGGAA GCTAAGCAGG | |
| mutant | GTCGGGCCTG GTTAGTACTT GGATGGGAGA | |
| | CCGCCTGGGA ATACCGGGTG CTGTAGGCGT | |
| | CGACTTGCCA TGTGTATGTG GGTACGAATT | |
| | AGATTAGATT AAGATTAGAG TACCCACATA | |
| | CTCTGATGAT CCTTCGGGAT CATTCATGGC | |
| | AATCTAGA | |
| 5S-F30- | GTCTACGGCC ATACCACCCT GAACGCGCCC | 6891 |
| Mango I | GATCTCGTCT GATCTCGGAA GCTAAGCAGG | |
| | GTCGGGCCTG GTTAGTACTT GGATGGGAGA | |
| | CCGCCTGGGA ATACCGGGTG CTGTAGGCGT | |
| | CGACTTGCCA TGTGTATGTG GGTACGAAGG | |
| | GACGGTGCGG AGAGGAGAGT ACCCACATAC | |
| | TCTGATGATC CTTCGGGATC ATTCATGGCA | |
| | ATCTAGA | |
| 5S-F30- | GTCTACGGCC ATACCACCCT GAACGCGCCC | 6892 |
| Mango II | GATCTCGTCT GATCTCGGAA GCTAAGCAGG | |
| | GTCGGGCCTG GTTAGTACTT GGATGGGAGA | |
| | CCGCCTGGGA ATACCGGGTG CTGTAGGCGT | |
| | CGACTTGCCA TGTGTATGTG GGTACGAAGG | |
| | AGAGGAGAGG AAGAGGAGAG TACCCACATA | |
| | CTCTGATGAT CCTTCGGGAT CATTCATGGC | |
| | AATCTAGA | |
| 5S-F30- | GTCTACGGCC ATACCACCCT GAACGCGCCC | 6893 |
| Mango III | GATCTCGTCT GATCTCGGAA GCTAAGCAGG | |
| | GTCGGGCCTG GTTAGTACTT GGATGGGAGA | |
| | CCGCCTGGGA ATACCGGGTG CTGTAGGCGT | |
| | CGACTTGCCA TGTGTATGTG GGTACGAAGG | |
| | AAGGATTGGT ATGTGGTATA TTCGTACCCA | |
| | CATACTCTGA TGATCCTTCG GGATCATTCA | |
| | TGGCAATCTA GA | |
| 5S-F30- | GTCTACGGCC ATACCACCCT GAACGCGCCC | 6894 |
| Mango IV | GATCTCGTCT GATCTCGGAA GCTAAGCAGG | |
| | GTCGGGCCTG GTTAGTACTT GGATGGGAGA | |
| | CCGCCTGGGA ATACCGGGTG CTGTAGGCGT | |
| | CGACTTGCCA TGTGTATGTG GGTACCGAGG | |
| | GAGTGGTGAG GATGAGGCGA GTACCCACAT | |
| | ACTCTGATGA TCCTTCGGGA TCATTCATGG | |
| | CAATCTAGA | |
| 5S Δ78-98- | GTCTACGGCC ATACCACCCT GAACGCGCCC | 6895 |
| F30-Mango | GATCTCGTCT GATCTCGGAA GCTAAGCAGG | |
| IV | GTCGGGCCTG GTTAGTAGAA AGAATACCGG | |
| | GTGCTGTAGG CGTCGACTTG CCATGTGTAT | |
| | GTGGGTACCG AGGGAGTGGT GAGGATGAGG | |
| | CGAGTACCCA CATACTCTGA TGATCCTTCG | |
| | GGATCATTCA TGGCAA | |
| U6-Mango | GTGCTCGCTT CGGCAGCACA TATACTAAAA | 6896 |
| IV | TTGGAACGAT ACAGAGAAGA TTAGCATGGC | |
| | CCCTACCGAG GGAGTGGTGA GGATGAGGCG | |
| | AGTAGGATGA CACGCAAATT CGTGAAGCGT | |
| | TCCATATTTT T | |
| 5′ SalI F30 | GGCGTCGACT TGCCATGTGT ATGTGGGTAC | 6899 |
| primer | | |
| 3′ XbaI F30 | CGCTCTAGAT TGCCATGAAT GATCCCGAAG | 6897 |
| primer | G | |
| 5′ T7 | GCCGGATCCT AATACGACTC ACTATAGTCT | 6898 |
| promoter 5S | ACGGCCATAC CACCC | |
| primer | | |

[0182] FIG. 15|Effect of formaldehyde on Mango fluorescence. Fluorescence of 50 nM RNA Mango I, II, III, and IV with 100 nM TO1-Biotin are measured at 30 second intervals at 25° C. In (a) RNA is first incubated with TO1-Biotin for one hour before addition of corresponding formaldehyde amounts and fluorescence is measured for another 100 minutes. In (b) RNA is incubated with the corresponding amounts of formaldehyde first for one hour, then TO1-Biotin is added. Data for each panel is normalized to RFU at the 0% formaldehyde, 0 min point.

[0183] FIG. 16|Formation of 5S-Mango foci and their dynamics in live cells. (a) 5S-Mango IV imaged post cell fixation at 5, 15, 30 and 60 mins after transfection using Lipofectamine based CRISPRMAX transfection reagent. (b) Live-cell imaging of 5S-Mango IV 60 mins post transfection and the RNA was pre-incubated with TO1-Biotin prior to transfection. (c) Root mean-squared displacement (RMSD) of three observed foci with different diffusive behaviors, fast (Green), slow (Blue) and static (Red) shown in Video 3. Scale bars are 10 μm and arrows indicate foci of interest. (d) Normalized photobleaching traces of 5S-F30-Mango I and IV compared to 5S-F30-dBroccoli under constant illumination with an exposure time of 200 ms. Photobleaching half-lives are stated in the table adjacent and were calculated from an exponential fit of each curve.

[0184] FIG. 17|Intensity Distributions of 5S-Mango I-IV. (a) Mean intensity distributions for 5S-F30-Mango I (Black), II (Blue), III (Green) and IV (Orange) foci compared with the 5S-F30-Control foci distribution (Red). Foci were determined using a diameter threshold ≥3×3 pixels in the ICY spot detector plugin. Number of foci for the mango tagged datasets shown as n. (b) Total pixel intensity distributions for 5S-Mango I-IV foci compared with the total 5S-F30-Control pixel intensities. Inset depicts the low frequency of high intensity pixels observed for each construct. (c) Representative maximum projections of fixed cells transfected with 5S-F30-Mango I-IV (top to bottom). Scale bars are 10 μm, stained with 1 μg/ml Hoechst 33258 (Blue) and 200 nM TO1-Biotin (Yellow).

[0185] FIG. 18|2D nuclear co-localization plots. Pixel by pixel intensity plots of the TO1-Biotin signal (200 nM) vs Hoechst 33258 signal (1 μg/ml) for both 5S-Mango IV and U6-Mango IV compare to their respective controls in fixed cells. For the Mango specific signal a threshold was set above the 5S-F30-Control background of 600 a.u. Whereas the threshold of the nuclear boundary is observed to be ˜2000 a.u. based on Hoechst 33258 staining. The upper quadrants highlight the number of pixels contain within and therefore depict pixels observed outside (upper left) or inside the nucleus (upper right). Each plot contained five maximum projection images with dimensions 1280×1280. The number of cells for 5S-F30-Control, 5S-F30-Mango IV, U6-Control and U6-Mango IV were 57, 114, 131 and 183 respectively.

[0186] FIG. 19|2D immunostaining co-localization plots. Normalized pixel by pixel intensity plots of the TO1-Biotin signal vs immunostaining signal for both Mitochondria (ATP5B, a-e) and snRNPs (LSm3, f-i). Background intensity values were determined either with a Mango IV tagged construct in the absence of immunostaining or a control construct in the presence of both TO1-Biotin and the appropriate immunostain (a,b,f and g). All plots were normalized by subtracting the background signal in each channel and then normalizing to the highest significant pixel intensity from each of the channels. (c-e) Show the co-localisation patterns of Mango tagged 5S, U6 and 5S Δ78-98 with Mitochondria. (h and i) Show co-localisation patterns of Mango tagged U6 and 5S with snRNPs. The upper quadrants highlight the number of pixels contained within and therefore depict the co-localised (upper right) and distinct (upper left) Mango signal. Each plot contains multiple slices taken from ˜five images with dimensions 1280×1280 to accurately determine co-localizing pixels. The number of cells for plots a, b, c, d and e were 66, 26, 178, 217 and 156 respectively. The number of cells for plots f, g, h and i were 34, 108, 165, and 89 respectively.

[0187] FIG. 20|Bipartite aptamer systems. This schematic illustration shows the Mango core as a loop, flanked by regions that are complementary to a target RNA of interest.

[0188] FIG. 21|Initial screening to find optimal “switch” and the “trigger” constructs for RNA Mango I based bipartite detection system. Looped line is the core Mango I G-quadruplex “GGG AC GGUG C GGAG A GGAG (SEQ ID NO: 1)”; sequences of Mango bait and RNA targets are set out.

[0189] FIG. 22|Bipartite mango probes for β-actin mRNA. (A) Model for β-actin mRNA transport, mRNA synthesized in the nucleus binds to Zipcode binding protein (ZBP1) which then associates with other proteins to bind to actin. The RNP then translocates to the leading edge of lamellipodia. (B). Fluorescence response of Mango I constructs that target β-actin mRNA. The Bipartite switch (50 nM) was added (at 10 min) to (100 nM) TO1-B. After 60 mins, the complementary in vitro transcribed ‘trigger’ RNA (100 nM) was added. (C) shows the sequence of the probe and the target sequences used.

[0190] FIG. 23|Bipartite construct with Mango II and 4 bp inhibitory stem. (A and B) Schematic representation of Mango II construct without inhibitory stem (MII) and with inhibitory stem (MII+4i). (C) Fluorescence response of the biparite constructs. The Bipartite switch (50 nM) was added (at 10 min) to (100 nM) TO1-B. At 70 mins, the complementary in vitro transcribed ‘trigger’ RNA (100 nM) was added. Right—Table showing the contrast of bipartite constructs with and without inhibitory stem.

[0191] FIG. 24|Effect of inhibitory stem length on contrast and rate of fluorescence emergence. (A) The number associated with the MII annotation refers to the number of interfering nucleotides. The Bipartite switch (50 nM) was added (at 20 min) to (100 nM) TO1-B. After 80 mins, the complementary in vitro transcribed ‘trigger’ RNA (100 nM) was added. (B) Sequences of the constructs used in the panel (A). In bold are potentially base pairing nucleotides that destabilize the G-quadruplex in the absence of trigger (target RNA).

[0192] FIG. 25|Schematic illustration of a generalized RNA Mango-based bipartite construct targeted to an RNA of interest.

[0193] FIG. 26|Mango IV based bipartite constructs alignment.

[0194] FIG. 27|Mango IV based bipartite construct measured contrast levels.

[0195] FIG. 28|Sequences of Mango switch probe used. Probe sequence shown 5′ to 3′ followed immediately by the complementary target shown 3′ to 5′. Mango I core sequence shown in purple, Mango II core sequence shown in blue.

[0196] FIG. 29|Time course of in vivo Mango I & II switch probes. 140 mM potassium chloride, 1 mM magnesium chloride, 10 mM sodium phosphate buffer (pH 7.2), and 100 nM TO1-biotin was incubated at 25° C. for 5 min before the addition of probe to a final of 50 nM. After 60 min incubation, a short complementary trigger strand was added to a final of 100 nM. Fluorescence excitation at 510 nm and emission read at 535 nm.

[0197] FIG. 30|Time course of in vivo Mango switch probes. 140 mM potassium chloride, 1 mM magnesium chloride, 10 mM sodium phosphate buffer (pH 7.2), and 100 nM TO1-biotin was incubated at 25° C. for 5 min before the addition of probe to a final of 50 nM. After 60 min incubation, a short complementary trigger strand was added to a final of 100 nM. Fluorescence excitation at 510 nm and emission read at 535 nm. Before trigger corresponds to t=69 min, after trigger t=200 min, C=after trigger/before trigger.

[0198] FIG. 31|T7 transcription of all unimolecular templates. Assay performed in 40 mM Tris pH 7.9, 2.5 mM spermidine, 26 mM MgCl₂, 0.01% triton X-100, 140 mM KCl, 0.5 μM DNA template, 200 nM TO1-Biotin, 10 mM DTT, 0.5 μM T7 promoter compliment strand, 0.3 U/600 μL pyrophosphatase (Invitrogen), 8 mM GTP, 5 mM CTP, 2 mM UTP, 5 mM ATP. At t=10, 30 μL/600 μL reaction diluted T7 enzyme was added.

[0199] FIG. 32|Rolling circle transcription of Mango III. T7 RNA polymerase added to supplemented mixture at 5 min 30 sec. Fluorescence excitation at 510 nm and emission at 535 nm. Orange: RNA target with oligo ligated with SplintR Ligase (NEB), Blue: DNA target with oligo ligated with T4 DNA Ligase (NEB).

[0200] FIG. 33|Rolling circle transcription of Mango III. Circular template (represented in FIG. 34), was titrated and room temperature T7 transcription was initiated in the presence of excess of TO1-Biotin fluorophore.

[0201] FIG. 34|Rolling circle transcription of Mango III. Circular construct represented here was used in FIG. 33. Purple: T7 binding site, red and orange template hybridization arms (ligation site between them). Blue Mango sequence. T7 transcription of this DNA template results in multiple Mango repeats that once formed are able to bind TO1-Biotin (yellow hexagons) and fluoresce.

[0202] FIG. 35|Structure of Mango-II in complex with TO1-Biotin. (A) Chemical structures of TO1-Biotin and TO3-Biotin. The latter contains two additional methine carbons. (B) Secondary structure of the Mango-III-TO1-Biotin complex. Thin lines with arrows denote connectivity. Base pairs are represented with Leontis-Westhof symbols.¹¹ Location of fluorophore and two potassium ions (TO1, M_{A}, and M_{B}) is indicated. This color scheme is used throughout the manuscript except where noted. (C) Cartoon representation of the Mango-II-TO1-Biotin complex. Arrows adjacent to the cartoon denote chain direction.

[0203] FIG. 36|Structure of the Mango-II-TO3-Biotin complex. Cartoon representation of chain A of the Mango-II-TO3-Biotin complex. Color scheme is the same as FIG. 1C with the exception of TO3-Biotin colored as red sticks

[0204] FIG. 37|Analytical ultracentrifugation of Mango-II-TO1-Biotin complex.

[0205] FIG. 38|The Mango-II G-quadruplex. (A) Augmented Tier 1 (T1, purple) and Tier 2 G-quartets (T2, blue) of the Mango-III-TO1-Biotin complex. T1 is augmented into a hexad. (B) Side view.

[0206] FIG. 39|Plasticity of the Mango-III ligand binding pocket. (A) Cartoon representation of the ligand binding pocket of chain A of the Mango-II-TO1-Biotin complex structure, with fluorophore electron density (2|Fo|−|Fc| prior to building the ligand, contoured at 1.2σ, blue mesh) shown in mesh. (B) Overlay of the fluorophores from the three complexes in the asymmetric unit aligned on chain C. TO1-Biotin from chains A, B, and C are shown in transparent red, transparent purple and blue, respectively. In chain C, A22 and A28 are disordered. (C) Fluorophore electron density (2|Fo|−|Fc|) prior to building the ligand, contoured at 1.2σ, blue mesh) for chain A of the Mango-II-TO3-Biotin complex structure. (D) Overlay of the ligands in chain A (purple) and chain B (red). The chain A RNA is shown. (E) Cartoon representation of the ligand binding pocket of chain B of the Mango-II(A22U)-TO1-Biotin complex Fluorophore electron density (2|Fo|−|Fc| prior to building the ligand, contoured at 1.2σ) blue mesh. (F) Overlay of the ligands in chains A, B and C (purple, blue and red, respectively). Chain A RNA shown.

[0207] FIG. 40|Structural comparison of the Mango-I-TO1-Biotin complex and the Mango-II-TO1-Biotin complex. Side by side comparison of Mango-I-TO1-Biotin (left) and Mango-II-TO1-Biotin (right) showing distinct, unequivalent conformations of the TO1-Biotin ligand in each structure.

[0208] FIG. 41|Fluorescence lifetime traces of TO1-Biotin, Mango-II wt and A22U with TO1-Biotin. Comparison of the lifetime decay obtained from TO1-B free in solution (left panel), and when bound to Mango II wt (central panel), or Mango II A22U (right panel). In each panel the data are presented as filled circles, the red line shows the fit to the data, reconvoluted with the IRF, and underneath the data the residuals from the fit are shown. On each panel, the intensity-weighted average lifetime is reported. For details about the individual lifetime components and their amplitudes.

[0209] FIG. 42|Mango-II binding and fluorescence enhancement of thiazole orange derivatives. Dissociation constants, Kd, and fluorescence enhancement, (gray and green bars, respectively) for various TO1-Biotin derivatives. Length of the linker between TO1 and biotin increases from left to right.

[0210] FIG. 43|Fluorogenic RNA Mango aptamers for imaging small non-coding RNAs in mammalian cells. Cellular imaging of genetically encoded Mango II-tagged RNAs. a) Diagram of plasmid constructs with the 5S rRNAs and mgU2-47 scaRNAs under the control of a murine U6 promoter (Pol III) and co-expression of a mCherry reporter gene (CMV promoter). Shown adjacent are images of individual slices of fixed cells either expressing Mango II-tagged RNAs (top) or control RNAs (bottom) with the TO1-B (200 nM) signal in yellow, mCherry in red and brightfield image in greyscale. Arrows depict significant cellular and nuclear foci. Scale bar=10 μm. b) 2D maximum intensity plots of individual nucleoli and Mango II specific foci for both the TO1-B signal (y axis) and mCherry signal (x axis-log 10 scale). The number of cells for 5S-F30-Control, 5S-F30-Mango II, untransfected cells +TO1-B, mgU2-47 Control and mgU2-47 Mango II were 89, 167, 98, 130 and 117 respectively. c) Maximum projections of cytoplasmic 5S-F30-Mango IV foci and nuclear mgU2-47 foci from plasmid expression in conjunction with immunostained ribosomes (RP-L7), mitochondria (ATP5B) and Cajal bodies (Coilin). Arrows depict significantly co-localized foci, scale bar=10 μm

[0211] FIG. 44|Crystal contacts of the Mango-III-TO1-Biotin Complex

[0212] FIG. 45|Analytical Ultracentrifugation of the Mango-III-TO1-Biotin

[0213] FIG. 46|Structure of the Mango-III-TO1-Biotin complex. a, Chemical structure of TO1-Biotin and TO3-Biotin. b, Secondary structure. Thin lines with arrowheads denote connectivity. Leontis-Westhof symbols denote base pairs. c, Cartoon representation of the three-dimensional structure of the complex colored as in (b). Arrows indicate 5′ to 3′ chain direction, and purple spheres represent K⁺. d, Sequence alignment of Mango-I and Mango-III aptamer RNA cores colored as in (b). Lines depict base pairing, except for the G-Quadruplex (black lines). Co-varying nucleotide shaded gray.

[0214] FIG. 47|Structure of the duplex-triplex-quadruplex junction. a, Base positions of T1, T2 and T3 as well as co-solvent interactions in the Mango-III core. U31, A30 and G25 are buckled and stacking on each other. A central water molecule (W₁) is represented with a red sphere and the central K⁺ ion (M_{A}) is represented by a purple sphere. (b) Hydrated metal ion network (purple and red spheres) with hydrogen bonding interactions between P1 (red), T1 (purple) and T2 (marine) represented by black dashed lines. Inner-sphere metal ion coordination is represented by orange dashed lines. (c) Ball-and-stick representation of the T2 and T3 tiers and the central potassium ion M_{A}. Black and orange dashed lines represent hydrogen-bonding and inner-sphere cation coordination, respectively.

[0215] FIG. 48|Structure of the non-canonical P2 helix a, U15*U22 trans Watson-Crick base pair. b, A16*A23 trans Hoogsteen base pair. Dashed lines, hydrogen bonds. c, G21•U24 cis single-hydrogen bond base pair. G21 is shown to highlight cross-strand stacking. A16 is shown to highlight cross-strand stacking.d, View of P2 from the direction of the G21-U24 strand. Arrows denote 5′- to 3′ chain direction. e, 180° rotation along a vertical axis.

[0216] FIG. 49|Fluorophore binding by Mango-III. (a) Ball-and-stick representation of the ligand binding pocket superimposed on the 2|Fo|−|Fc| electron density map calculated before addition of ligand to the crystallographic model (grey mesh, 1.5σ contour). The native anomalous difference Fourier synthesis is shown as a solid green surface at 4σ contour. Inset shows the structural alignment of the TO1-Biotin fluorophores from each chain in the Mango-III(wt)-TO1-Biotin complex. (b) Top view of the Mango-III-TO1-Biotin binding-pocket and P2 (orange ball-and-stick). (c) Ball-and-stick representation of the ligand binding pocket of Mango-III(A15U)-TO1-Biotin complex superimposed on the 2|Fo|−|Fc| electron density map calculated before addition of ligand to the crystallographic model (grey mesh, 1.2σ contour). Inset shows the structural alignment of two TO1-Biotin fluorophores from each chains A and C of the Mango-III(A15U)-TO1-Biotin structure. (d) Top view of the Mango-III(A15U)-TO1-Biotin binding-pocket and P2 (orange ball-and-stick).

[0217] FIG. 50|Structure guided re-selection of ‘Super-Mango-III’.

[0218] FIG. 51|Structure of the Mango-II helix junction. (A) Tetraloop like junction of Mango-II superimposed with a canonical GAAA tetraloop (PDB 4FNJ)*, RMSD 0.30 Å. (B) Adjacent region to the tetraloop junction showing stabilizing hydrogen bonding interactions.

[0219] FIG. 52|#₁ and #₂ Mutations and effect on binding and MIII construct brightness.

[0220] FIG. 53|Brightness response of MI, MII, MIII mutants and MIV to a fluorophore series. Single fluorescence point reads done in triplicate. 500 nM RNa was incubated with 10 nM fluorophore at room temperature for ˜1 h to allow folding of the RNA aptamers in 1×WB (140 mM KCl, 1 mM MgCl₂, 10 mM NaH₂PO₄, pH 7.2.

### DETAILED DESCRIPTION

[0221] Microfluidic Isolation of Mango Aptamers

[0222] As illustrated in FIG. 1, TO1-Biotin binding variants were selected using droplet-based microfluidics fluorescence screening in the presence of competitors. The fluorescence profile of droplets containing Mango-I of an initial library (˜200,000 variants, designated R12) is shown in Table 3.

TABLE 3
Metrics of the fluorescence profiling of Mango and R12

| | | | | Fusion | Number of | Number of |
|---|---|---|---|---|---|---|
| | Temperature | TO-1 | λ | efficiency | analyzed | analyzed |
| Round | (° C.) | (nM) | value | (%) | droplets | variants |
| R12-library | 25 | 100 | 1.25 | 95 | 168,441 | 200,023 |
| Mango | 25 | 100 | 0.54 | 95 | 63,200 | 1 |

[0223] The microfluidic-assisted in vitro compartmentalisation (pIVC, FIG. 1a), shows that a significant fraction of molecules in the R12 library are brighter than Mango I (FIG. 1b).

[0224] A potential limitation of pIVC is the requirement of high TO1-Biotin concentrations (˜100 nM), that would greatly exceed the Mango-I K_{D} (˜3 nM), and that could prevent the selection of high affinity aptamers. To mitigate this, we supplemented the in vitro transcription (IVT) mixture with TO1 competitors NMM (N-methyl mesoporphyrin IX) and TO3-Biotin, which are both known to interact with G-quadruplexes. The NMM supplemented IVT mixture significantly reduces TO1-Biotin/Mango-I fluorescence (FIG. 4). The NMM concentration was progressively increased during the first four screening rounds, therefore, any brightness increase at each round presumably resulted from the selection of brighter aptamers in the library which retaining high affinity and selectivity for TO1-Biotin (FIG. 1c). The RNA stability of the complex with TO1-Biotin was further challenged by sorting the droplets at 45° C. The relative fluorescence of the library increased 2.5-fold in the first round (˜3 million variants analysed, Table 4), but it did not increase further over the later rounds (FIG. 1c, FIG. 5). However, the ability of NMM to compete against TO1-Biotin binding decreased progressively with each round (FIG. 6), indicating that the aptamers in the later rounds have higher affinity for TO1-Biotin.

TABLE 4
Metrics of screenings in presence of NMM

| | | | | Fusion | Number of | Number of | Number of |
|---|---|---|---|---|---|---|---|
| | Temperature | NMM | λ | efficiency | analyzed | analyzed | sorted |
| Round | (° C.) | (μM) | value | (%) | droplets | variants | droplets |
| 1 | 45 | 3 | 1.25 | 90 | 2,716,500 | 3,056,062 | 25,834 |
| 2 | 45 | 4 | 0.2 | 85 | 1,011,000 | 171,870 | 21,754 |
| 3 | 45 | 6 | 0.22 | 87 | 1,511,250 | 289,253 | 3,719 |
| 4 | 45 | 8 | 0.14 | 75 | 986,875 | 103,621 | 5,309 |
| 5 | 45 | 0 | 0.15 | 90 | 491,625 | 66,369 | 1,689 |

[0225] The last screening round shows that, in the absence of NMM, the fluorogenic properties of the enriched library remained unchanged (FIG. 1c). From the final enriched library, we cloned and sequenced 32 pool RNAs, and analysed their fluorogenic capacity (FIG. 7a, b). While the brightest clone was R5-NMM-20, six of the thirteen brightest aptamers exhibited an almost identical sequence to clone R5-NMM-5 (FIG. 7c).

[0226] In a second set of screenings, we increased the selection stringency by using the Mango-I specific competitor TO3-Biotin, which differs from TO1-Biotin by only two carbons in the methine bridge. To further increase the selection pressure for TO1-Biotin binding, we also decreased the RNA concentration in the droplets to 0.3 μM (from 8 μM with NMM). TO3-Biotin competitor was introduced in the second round of screening to ensure that positive droplets were not missed in the first round (FIG. 5b). In subsequent rounds, TO3-Biotin concentration was gradually increased (FIG. 1d and FIG. 6b and Table 4).

TABLE 5
Metrics of screenings in the presence of TO-3

| | | | | | Fusion | Number of | Number of | Number of |
|---|---|---|---|---|---|---|---|---|
| | Temperature | T0-3 | T0-1 | λ | efficiency | analyzed | analyzed | sorted |
| Round | (° C.) | (nM) | (nM) | value | (%) | droplets | variants | droplets |
| 1 | 45 | 0 | 100 | 1.25 | 95 | 2,328,630 | 2,765,248 | 4,607 |
| 2 | 45 | 50 | 100 | 0.2 | 80 | 1,106,750 | 177,080 | 8,328 |
| 3 | 45 | 75 | 100 | 0.15 | 94 | 1,019,990 | 143,818 | 6,446 |
| 4 | 45 | 100 | 100 | 0.2 | 95 | 1,002,500 | 190,475 | 11,478 |
| 5 | 45 | 200 | 100 | 0.17 | 90 | 1,044,500 | 159,808 | 12,205 |
| 6 | 45 | 400 | 100 | 0.25 | 85 | 1,015,880 | 215,874 | 8,779 |
| 7 | 25 | 800 | 100 | 0.2 | 79 | 1,087,500 | 195,750 | 8,463 |
| 8 | 45 | 1,600 | 100 | 0.26 | 88 | 768,250 | 175,775 | 4,729 |
| 9 | 25 | 3,200 | 100 | 0.28 | 75 | 547,250 | 114,922 | 5,868 |
| 10 | 45 | 0 | 25 | 0.15 | 70 | 499,500 | 52,447 | 4,004 |

[0227] In round 1, the relative fluorescence of the population increased, but it decreased upon addition of competitor (Round 2, FIG. 1d). In subsequent rounds, the relative fluorescence increased progressively until the TO3-Biotin concentration exceeded TO1-Biotin by 32-fold (3.2 μM and 100 nM, respectively). The final round shows that the enriched library maintains its florescent properties in the absence of competitor. RNA molecules from each of the final rounds were cloned and sequenced. Further characterization of the different libraries indicates that aptamers were first selected for their capacity to discriminate TO1-Biotin from TO3-Biotin (FIGS. 6b and c). Surprisingly, we found that, starting from round 3, the libraries were dominated by a single cluster of sequences (cluster E, FIG. 8) that was attributed to the TO3-resistant aptamers discussed above. In the last four rounds, this sequence was progressively replaced by the point mutant C66U; best represented by the aptamer R10-15. The progressive domination by R10-15 was likely at the origin of the fluorescence improvement observed in the last rounds of selection. Accordingly, reverting the C66U mutation decreases the fluorescence of the aptamer/TO1-Biotin complex by ˜44%. Finally, among the remaining clusters identified in the early rounds, cluster D, represented by R2-1, was found to have particularly high binding affinity.

[0228] Aptamer Structure and Function

[0229] Based on the parental sequence isolates R2-1, R5-NMM-20 and R5-NMM-5 (FIGS. 6, 7 & 8), we engineered the minimal reference constructs Mango-II, Mango-III and Mango-IV (FIG. 2a), respectively, by truncation and sequence manipulation while maintaining the binding and fluorescent properties of the parental constructs (FIG. 9). Mango-II, III and IV were found to be 1.5-, 4- and 3-fold brighter than Mango-I, respectively (FIG. 2b). Mango-II binds TO1-Biotin with subnanomolar affinity, while Mango-III and IV had slightly weaker affinities than Mango-I (FIG. 2b). These constructs also demonstrated improved fluorescence response when bound to TO3-Biotin relative to Mango-I while exhibiting nanomolar binding affinities to this strongly red shifted fluorophore (FIG. 2c). Notably, the brightness of the Mango-III and Mango-IV TO1-Biotin bound complexes are 43,000 M⁻¹ cm⁻¹ and 32,000 M⁻¹ cm⁻¹, respectively, making Mango-III 1.3 times brighter than enhanced GFP (EGFP) a common benchmark for the characterization of improved fluorescent proteins.

[0230] Mango-II has a distinct flurophore binding mode from that of Mango-I. Crystallography shows that Mango-I consists of a three-tiered G-quadruplex core that binds TO1-Biotin by sandwiching it between the T3 layer of the G-quadruplex and A25 and A30 (FIG. 2a). This fluorophore binding core is isolated from an arbitrary RNA duplex (FIG. 2a, purple residues) by a novel GAAA tetraloop like adapter (FIG. 2a, blue residues). Like Mango-I, the Mango-II and IV aptamers function in the presence of a closing stem (FIGS. 2 & 9). DMS probing, which correctly confirmed the three-tiered quadruplex structure of Mango-I, indicated that Mango-II also contains a three-tiered quadruplex structure (FIG. 2d). In distinct contrast to Mango-I this aptamer appears to have looped out its A15 and has an adenine dinucleotide in its third propeller loop. This single A25 adenine found in these region of Mango-I is stacked on top of the methylquinone heterocycle of the TO1-Biotin implicating an important functional role in this sequence change in Mango-II. Indeed either of these changes either individually or together were shown to play an important role in the improved affinity and brightness of Mango-II (FIG. 9b).

[0231] Mango-IV, while superficially similar to both Mango-I and Mango-II based on primary sequence (FIG. 2a), surprisingly lacked N-7 protection at residue G15. This residue in Mango-I plays an important role in forming strand 1 of the T3 quadruplex tier and is fully DMS protected in Mango-I (FIG. 2a,d). Further, Mango-IV lacked DMS protection of residue G33, which in Mango-I plays an instrumental role in forming the T3 G-quartet and that is DMS protected in Mango-II. In addition the GAAA linker motif of Mango-I, that is apparently also present in Mango-II was not found in Mango-IV, with CGA being found before the first quadruplex tier of Mango-IV. Replacing the CGA of the Mango-IV sequence with GAA resulted in a four-fold decrease in binding affinity, suggesting a new role for this sequence element. This data supported by additional point mutational analysis (FIG. 9) indicates that the detailed folds of both Mango-II and Mango-IV are not only considerably different from each other but also Mango-I in the T3 region of the Mango-I fold (FIG. 2a).

[0232] The folding of the presently disclosed constructs was characterized further by examining their salt dependence, thermal melting properties, and CD spectra. Both Mango-II and IV have Hill coefficients and affinities for potassium similar to Mango-I (FIG. 10), and while Mango-I and Mango-II did not fluoresce appreciably in the presence of sodium ions, Mango-IV showed a limited fluorescence response. Most notably these aptamers in the presence of potassium were significantly resistant to high levels of Mg²⁺ (256 mM) whereas Mango-I fluorescence was strongly inhibited at such concentrations indicating that Mango-II and Mango-IV were substantially more stably folded than Mango-I. Consistent with this, the DMS protection patterns of these aptamers (FIG. 2d) were largely invariant in the presence or absence of TO1-Biotin. In addition, Mango-II and Mango-IV have A₂₆₀ thermal melts that change little in the presence or absence of TO1-Biotin (FIG. 11). This is in distinct contrast to the thermal melt of Mango-I, which changes significantly upon presence or absence of TO1-Biotin. Consistent with the formation of a G-quadruplex structure in Mango-I, II, and IV the ligand bound CD spectra for each aptamer were quite similar (FIG. 12).

[0233] Mango-III, the brightest of the three exemplified aptamers was considerably different from the other three Mangos. Unable to form a three tiered G-quadruplex even in principle due to the presence of only nine guanines in its core, these guanines where, nevertheless found to be well protected from DMS (FIG. 2d) and a variety of evidence in addition to DMS probing indicates that they form a distinctly different two tiered quadruplex core in Mango-III. Mango-Ill contains much longer A/U rich propeller regions than any of the other Mangos exemplified herein (FIG. 2a) and has a fluorescence response to potassium and sodium that had a dramatically higher affinity (˜two order of magnitude), while being only modestly inhibited by high levels of magnesium (FIG. 10). Its sigmodial fluorescent melting curve strongly resembles the melting of RNA Spinach and not the more linear melting curves observed for Mango-I, II and IV (FIG. 11). Similarly the CD spectra of the bound Mango-III complex is distinctly different in the 270-300 nm region from the other Mango constructs, indicative of a G-quadruplex structure distinct from that found in Mango-I (FIG. 12). Mango-III lacked an excitation shoulder found to be in common for all the other Mango constructs in the 270-300 nm region (FIG. 13), this and other differences in the excitation and emission spectra indicate that Mango-III has a motif significantly different from the other Mango aptamers exemplified herein.

[0234] Cellular Imaging of Mango Tagged RNAs

[0235] To demonstrate the efficacy of the exemplified aptamers in cellular imaging, we tagged the well characterized human 5S ribosomal RNA with each Mango variant by incorporating them into an F30 folding scaffold (FIG. 14a, Table 5) previously shown to improve cellular fluorescence. Each Mango tagged 5S RNA, with or without the folding scaffold or terminator hairpin, exhibited comparable fluorescence intensities in vitro (FIG. 14b). No appreciable fluorescence was observed with Mango mutants or in the absence of Mango RNA or TO1-Biotin fluorophore.

[0236] To image the tagged RNA, we transfected in vitro transcribed 5S-F30-Mango RNAs into HEK293T cells, fixed the cells on ice with formaldehyde and stained with TO1-Biotin. This protocol being based on the surprising finding that in vitro, Mango-I, II and IV fluorophore-aptamer complexes were substantially resistant to formaldehyde at room temperature (FIG. 15). Up to ˜10 bright RNA Mango foci could be readily detected per cell with a fluorescence microscope, but not in control transfections (FIG. 3a). A time course of this process (FIG. 16a) shows the initial delivery of lipofectamine particles to the cell membrane (5 min after transfection), followed by dispersal of the RNA in the cytoplasm (15-30 min) and foci formation (30-60 min). Contrary to 5S-F30-Mango-I, II and III, transfections with 5S-F30-Mango-IV RNA consistently exhibit visible foci (FIGS. 16 & 17), indicating that Mango-IV folds correctly both in the presence and absence of TO1-Biotin, unlike the others (FIG. 11). The mean intensity of the 5S-F30-Mango-IV foci is two to three-fold higher than the 5S-F30-Control background (FIG. 3b and FIG. 17). The majority of 5S-F30-Mango IV foci (˜85%) are cytoplasmic, a small fraction (˜5%) are clearly nuclear, and the remaining foci appeared on the nuclear boundary.

[0237] To illustrate the sub-cellular localization of the 5S-F30-Mango IV foci, we combined Mango imaging with immunostaining, which is made feasible by the ability of Mango-IV to withstand formaldehyde fixation. It has been shown that 5S rRNA is imported into mitochondria to facilitate the translation of mitochondrial proteins. Cytoplasmic 5S-Mango IV foci clearly overlap with immunostained mitochondria (FIG. 3c). Cytoplasmic 5S-Mango IV foci also overlap with antibody staining against the Ribosomal Protein S6 (RP-S6, FIG. 3d). Conversely, we do not observe overlap with other sub-cellular compartments, such as P-bodies, Endosomes or Stress Granules, where the transfected RNA could be processed for degradation (FIG. 3e).

[0238] To confirm that the observed foci are specific, we tagged and transfected an RNA that localizes to a different cellular compartment. The U6 snRNA (small nuclear RNA) is expected to associate with snRNP (Ribonuclear Protein) complexes in the nucleus. We tagged U6 snRNA by incorporating Mango-IV directly into an internal stem loop (FIG. 14). The resulting construct exhibits comparable fluorescence intensity to Mango IV alone in vitro (FIG. 14). Direct transfection of U6-Mango-IV snRNA yields fluorescent foci comparable to 5S-F30-Mango-IV (FIG. 3a), albeit with lower intensity (FIG. 3b). The fraction of nuclear foci increased ˜9-fold, while cytoplasmic foci decrease significantly (p<0.01, FIG. 3b). As opposed to 5S-F30-Mango-IV, cytoplasmic U6-Mango-IV foci did not overlap with mitochondria (FIG. 3c) or ribosomes (FIG. 3d), whereas nuclear U6-Mango-IV foci overlap with snRNP protein Lsm3 (FIG. 3d), as expected. Similar to 5S-F30-Mango-IV, U6-Mango-IV foci do not overlap with other sub-cellular compartments, such as P-bodies, Endosomes or Stress Granules (FIG. 3e). Interestingly, we observe a diffuse signal above background in the nucleolus, which may correspond to freely diffusing U6-Mango IV molecules (FIG. 3a,d and FIG. 18).

[0239] Taken together, these fixed cell data show that Mango-IV, and other aptamers disclosed herein, can be used to label and image small cellular RNAs via direct transfection of in vitro transcribed RNAs, without affecting their expected sub-cellular localization. Finally, to illustrate that Mango-tagged RNA molecules can be imaged in live cells, we took advantage of the aptamer's high affinity for TO1-Biotin, and transfected in vitro transcribed 5S-F30-Mango-IV RNA pre-incubated with TO1-Biotin. After transfection the cells exhibit bright foci similar to those observed in FIG. 3a, with lower background fluorescence than observed in fixed cells (FIG. 16b). The foci can be readily tracked revealing three distinct diffusive behaviors: fast, slow and static (FIG. 16b). No such foci were observed in experiments with the 5S-F30-Control. Overall, these results demonstrate that fluorogenic Mango RNA aptamers are a versatile tool to image small cellular RNAs in fixed and live cells.

[0240] To estimate the number of fluorescent 5S-F30-Mango IV molecules in each foci, we performed photobleaching-assisted microscopy on fixed cells. A maximum likelihood estimate analysis of the photobleaching trajectories^{27,28}, revealed between 4 and 17 photobleaching steps per foci. In addition, the photobleaching step distribution reveals two peaks corresponding to either one or two molecules. The number of observed steps correlates linearly with the initial foci intensity below 2,000 intensity units. Altogether, these results indicate that each foci contains at least 4 to 17 fluorescent molecules, consistent with the observed range of experimental intensities, and raises the interesting possibility of imaging single molecules in live cells.

[0241] Finally, to test whether the new Mangos have the ability to function as genetically encoded tags expressed in cells, we constructed plasmids that express the 5S rRNA under the control of a RNA pol III promoter in conjunction with a mCherry reporter gene to identify successfully transfected cells (FIG. 43a). Upon fixation, we observed that cells expressing the pSLQ-5S-F30-Mango II and IV constructs exhibit an increased fluorescent signal in nucleolar compartments as well as forming distinct cytoplasmic foci when compared with the pSLQ-5S-F30-Control construct (FIG. 43a). The analysis of the peak Mango and mCherry intensities for multiple cells expressing the pSLQ-5S-F30-Mango II plasmid shows a population of cells with a high Mango specific signal, not seen in cells expressing the pSLQ-5S-F30-Control plasmid (FIG. 5b). Interestingly, we observe that cells exhibiting lower mCherry intensities can also show higher Mango signal, consistent with RNA transcription preceding mCherry translation. In agreement with this, reducing plasmid expression time, from 24 to 12 h, increased the number of observed cytoplasmic foci. Under the same conditions of fixation and staining, signal was not observed in untransfected cells or in cells expressing the 5S-F30-Broccoli construct. The robust cytoplasmic signal observed after 12 h of pSLQ-5S-Mango IV expression enabled us to combine Mango imaging with immunofluorescence (FIG. 43c). As expected, the observed Mango foci co-localize significantly with Ribosomal Protein L7. However, no significant co-localization was observed with the mitochondrial stain ATP5B. The absence of co-mitochondrial localization, in this case, is likely due to the fact that most nucleolar expressed 5S rRNA will assemble into ribosomes in the nucleus, whereas 5S rRNA molecules transfected directly in the cytoplasm will not, and are more readily available for mitochondrial import. The observed cytoplasmic foci did not co-localize with immunostaining for stress granules, P-bodies or endosomes.

[0242] To confirm that the observed 5S rRNA foci are specific, we expressed a Mango II tagged small Cajal-body specific RNA (mgU2-47) that mediates the 2′-O-methylation of the U2 snRNA²⁹. Upon expression, the Mango tagged mgU2-47 RNA formed well defined nuclear foci that were absent in the mgU2-47 Control RNA (FIGS. 43a and b). The nuclear foci also co-localized with immunostained Cajal-bodies (FIG. 43c). Taken together these results demonstrate the ability of Mango tags to function as efficient genetically encoded reporters of RNA sub-cellular location.

[0243] The photobleaching properties of Mango I and Mango IV were superior to RNA Spinach with bleaching half-lives 10 times longer on average under identical illumination conditions (FIG. 16 d&e).

[0244] Bipartite Aptamer Systems

[0245] In the X-Ray crystal structure of Mango I, the ‘GAA\hat{ }A’ tetraloop motif, with ‘GAA’ on the 5′ end of the G quadruplex core (represented by \hat{ }) and the remaining ‘A’ on the 3′ end of the core, separates two phosphates juxtaposed at the end of the core by 8 Å. We recognized that this 8 Å separation is important for fluorescence enhancement with select embodiments of RNA Mangos, with the G quadruplex in configuration for ligand binding. We have recreated this conformation in what are designated herein as bipartite embodiments, involving the complementary base pairing of portions of the Mango aptamers to an RNA target. In embodiments of this kind, the Mango aptamer acts as a switch, with fluorescence being switched on by binding to the target, which may accordingly be called a ‘trigger’. This is schematically illustrated in FIG. 20.

[0246] FIG. 20 shows various Mango I switches and triggers initially tested, illustrating that in these select embodiments Mango switches with two A residues in the GAÂ A′ tetraloop motif, an A being on the either side of the G-quadruplex core, gave maximal response to the binding of the trigger RNA. We also illustrate that those triggers which are continuously complementary to the bait regions, without any intervening gap of unpaired bases, to be optimal for fluorescence.

[0247] To illustrate a functional bipartite system, we used β-actin mRNA from mouse embryo fibroblasts as a model. β-actin mRNA, because of its Zipcode region binds to Zipcode Binding Protein (ZBP) which then binds to cytoskeleton proteins for transport to the leading edges of lamellipodia in growing fibroblasts (FIG. 22A). We developed RNA Mango constructs that target β-actin mRNA in a target region which has previously been shown not to interfere with the localization. We developed another RNA Mango construct that targets the Zipcode binding region, which when targeted causes delocalization of β-actin mRNA.

[0248] To quantitatively compare bipartite constructs, we measured the difference in RFU between bound and unbound Mangos, providing a contrast ratio of bound to unbound fluorescence, reflecting the increase in fluorescence upon binding of the bipartite construct to the target in the presence of the fluorophore. Higher contrast reflects lower background, and thus higher signal to noise ratio. For instance, in the Mango I based bipartite construct targeting p-actin mRNA in the target region 1087-1121, the equilibrium RFU after the addition of TO1-Biotin to the Mango construct is 3 (point a in FIG. 22B), after adding the target it increased to 321 (point b in FIG. 22B), a contrast of ˜110. In the same manner the contrast for the Mango construct targeting the zipcode region (2955-2990) of β-actin, is ˜80.

[0249] The Mango II core sequence was used to prepare alternative bipartite constructs that include an inhibitory stem, a sequence that is part of the aptamer that binds to a portion of the core sequence, thereby inhibiting core formation in the absence of binding to a target. Surprising, as illustrated in FIG. 23, we found that the addition of an inhibitory stem not only decreased fluorescence in the absence of the trigger, but also resulted in increased total fluorescence upon the addition of the trigger.

[0250] The length of the inhibitory stem may be adjusted in alternative embodiments. If the stem length is too short, it may not adequately destabilize the G-quadruplex, thus decreasing the contrast. If the stem length is too long, then the inhibited structure, with the stem bound to the core, may become so stable that it inhibits or delays folding of G-quadruplex upon trigger binding. In exemplary embodiments, we illustrate optimization of inhibitory stem length in Mango II constructs. Increasing the inhibitory arm length by increments of one nucleotide revealed that an inhibitory arm containing five nucleotides gave high contrast with minimal decrease in the rate of fluorescence increase (FIG. 24). A Mango bipartite construct, as illustrated in FIG. 25, has three parts:

[0251] 1) RNA mango core (i)—comprised of aptamer sequence that binds to TO1-B and becomes fluorescent;

[0252] 2) An inhibitory arm (ii)—comprised of regions complementary to the RNA Mango so that it binds and destabilizes RNA Mango core in the absence of a ‘trigger’ RNA, decreasing fluorescence in the absence of the RNA of interest;

[0253] 3) Bait (iiia, iiib and iiic)—comprised of one or more regions, which are complementary to the RNA of interest, sequence depending upon RNA of interest.

[0254] An alternative bipartite embodiment was prepared based on a Mango IV core sequence. A variety of constructs were tested (FIG. 26), with a range of results (FIG. 27) found.

[0255] A variety of bipartite Mango constructs were exemplified in vivo via transfection into MCF7 cells. In these embodiments, the sequences shown in FIG. 28 were used to probe for beta actin mRNA, with the exception of MII.O4, which acted as a non-hybridizing control. TO1-Biotin was introduced into the media, exemplifying the fact that it is cell permeable. FIG. 29 and FIG. 30 illustrate the time course of fluorescence for these bipartite Mango switch probes.

[0256] Unimolecular Mango III Rolling Circle Amplification

[0257] Early transcription assays revealed that the mango constructs are capable of displaying fluorescence enhancement in T7 transcription buffer supplemented with potassium to a final of 140 mM (FIG. 31). This illustrates that in select embodiments Mango aptamers may be used for detection of nucleic acids in a two-step fluorescence-based detection system using the Mango aptamers as the reporter. For example, using a conventional rolling circle amplification method as a first step, transcription in step two produces multiple copies of the Mango aptamer, which in turn bind TO1-biotin and progressively enhances fluorescence. Nucleic acid concentration can be discerned by a simple fluorescence reading. In these assays, the Mango III fluorescence emerged rapidly upon the addition of the RNA polymerase (FIG. 32). Sensitivity down to 5 nM was easily demonstrated without optimization and operating all enzymes isothermally at room temperature (FIGS. 33 & 34).

[0258] Fluorophores

[0259] A variety of flurophores may be used in alternative aspects of the presently disclosed compositions and processes. For example, U.S. Pat. No. 4,883,867 describes fluorometric assays for ribonucleic acids that use dyes having Formula I:

[chemical structure]

[0260] Wherein:
[0261] X=O, S, Se, or C(CH₃)ₙ;
[0262] R₁=alkyl having from 1-6 carbons;
[0263] R₂=alkyl having from 1-6 carbons;
[0264] R₃=fused benzene, alkyl having 1-6 carbons, methoxy or H;
[0265] R₄=alkyl having 1-6 carbons, methoxy or H; and
[0266] n=zero or an integer from 1-6.

[0267] Alternative embodiments disclosed therein include compounds wherein:
[0268] R₁=CH₃, R₂=CH₃, R₃=H, R₄=H, X=S, and n=1; or,
[0269] R₁=CH₃, R₂=CH₃, R₃=fused benzene, R₄=H, X=S, and n=0; or,
[0270] R, =CH₃, R₂=CH₃, R₃=H, R₄=H, X=0, and n=0; or,
[0271] X=O, S, Se or C(CH₃)₂, R₁=alkyl having from 1-6 carbons, R₂=alkyl having from 1-6 carbons, R₃=fused benzene, alkyl having 1-6 carbons, methoxy or is hydrogen, R₄=alkyl having 1-6 carbons, methoxy or H; and n=0 or an integer from 1-6; or,
[0272] R₁=CH₃, R₂=CH₃, R₃=H, R₄=H, X=S, and n=1; or,
[0273] R₁=CH₃, R₂=CH₃, R₃=fused benzene, R₄=H, X=S, and n=0; or,
[0274] R₁=CH₃, R₂=CH₃, R₃=H, R₄=H, X=O, and n=0.

[0275] In U.S. Pat. No. 4,883,867, Thiazole Orange (TO1) is identified as the compound of Formula I where R₁=R₂=CH₃; R₃=R₄=H, X=S and n=0. As such, TO1 is an asymmetric cyanine fluorophore, which contains a benzothiazole ring covalently linked to a quinoline ring via a monomethine bridge. In aqueous solution the fluorophore exhibits very low fluorescence (λₑₓ=500 nm, λₑₘ=525 nm, ϕ=2×10⁻⁴) due to rapid nonradiative decay through the torsional motion in the monomethine bridge joining the two heterocycles. Normally, TO1 becomes strongly fluorescent when the monomethine bridge connecting the two heterocycles is rigidified through nonspecific insertion into double-stranded helical nucleic acids giving a fluorescence quantum yield of 0.11. TO1 is characterized by: small size, lack of toxicity, plasma and nuclear membrane permeability, short intracellular half-life, and the accessibility of a broad wavelength range via simply synthesized TO1 analogues.

[0276] In the examples disclosed herein, it has been shown that a very wide variety of substituents may be present at R₁ in compounds of Formula I, for example comprising one or a combination of, substituted or unsubstituted: alkenyl, halogen (e.g., fluorine, chlorine, bromine, iodine, etc.), hydroxyl, alkoxy (e.g., methoxy, ethoxy, perchloromethoxy, perfluoromethoxy, etc.), alkylcarbonyloxy, alkyloxycarbonyl, arylcarbonyloxy, arylcarbonylamino, alkoxycarbonylamino, alkoxycarbonyloxy, aryloxycarbonyloxy, carboxylate, alkylcarbonyl, alkylaminoacarbonyl, arylalkyl aminocarbonyl, alkenylaminocarbonyl, alkylcarbonyl, arylcarbonyl, aminoalkyl, arylalkylcarbonyl, alkenylcarbonyl, alkoxycarbonyl, silyl, aminocarbonyl, alkylthiocarbonyl, phosphate, aralkyl, phosphonato, phosphinato, cyano, amino, acylamino, amido, imino, sulfhydryl, alkylthio, sulfate, arylthio, thiocarboxylate, alkylsulfinyl, sulfonato, sulfamoyl, sulfonamido, nitro, cyano, azido, heterocyclyl, alkylaryl, aryl and heteroaryl substituents. The R₁ group of Formula I may accordingly be substituted with any substituent which allows the fluorophore compound to perform its intended function.

[0277] In alternative embodiments, fluorophores for use as disclosed herein may include compounds of Formula II:

[chemical structure]

[0278] Wherein:

R Groups

| | |
|---|---|
| R₁ | Any substituent which allows the fluorophore compound |
| | to perform its intended function, eg: biotin, fluorescent |
| | dyes, NEB SNAP tags, with or without an amide bond in |
| | the linker. |
| R₂ through R₅ | H, F, Cl, Br, I, CH₃, linear polymers, extended |
| | heterocycles (i.e. built of adjacent pairs of groups). |
| R₆-R₉ | H, F, Cl, Br, I, CH₃, linear polymers, extended |
| | heterocycles (i.e. built of adjacent pairs of groups). |
| R₁₀ | H, F, Cl, Br, I, CH₃, linear polymers, extended |
| | heterocycles. |
| R₁₁ through R₁₂ | H, F, Cl, Br, I, CH₃, linear polymers, extended |
| | heterocycles (i.e. built of adjacent pairs of groups). |
| X atoms | O (YO3), S (TO1 & TO3), Se. |
| n (bridging groups) | 1 (TO1) or 3 (TO3), or 5. |

[0279] In selected embodiments, R₁ of compounds of Formula I or Formula II may be functionalized. For example, TO1-Acetate may be used as the basis for attaching a biotin tag for in vitro selection and subsequent complex purification. Embodiments have for example been tested and shown to work having biotinylated R₁ substituents, with PEG linkers, for TO1 (n=1) and TO3 (n=3), including biotin (with variable length PEG linkers), desthiobiotin (with variable length PEG linkers), and CY5™, wherein R₁ is, respectively:

[chemical structure]

[0280] Advantageously, the following other specific compounds are encompassed by the invention:

[chemical structure]

and in particular

[chemical structure]

and in particular

[chemical structure]

[0281] Unless explicitly stated otherwise, the terms “alkyl” and “heteroalkyl” each includes any reasonable combination of the following: (1) saturated alkyls as well as unsaturated alkyls (e.g. alkenyls and alkynyls); (2) linear or branched; (3) acyclic, cyclic (aromatic or nonaromatic) or multi-cyclic (fused rings, multiple non-fused rings or a combination thereof); and (4) unsubstituted or substituted. For example, an alkyl or heteroalkyl (i.e. “alkyl/heteroalkyl”) may be saturated, branched and cyclic, or unsaturated, branched and cyclic, or linear and unsaturated, or any other reasonable combination according to the skill of the person of skill in the art. Where the size of the alkyl/heteroalkyl is specified as X₁-Xz, where z is any integer larger than 1 (e.g. 15, 18, 30, 100 or the like), it will be understood that the alkyl/heteroalkyl comprises at least 3 carbons and heteroatoms so as to form a ring. If unspecified, the size of the alkyl/heteroalkyl is what would be considered reasonable to the person of skill in the art. For example, but without limitation, if unspecified, the size of an alkyl may be 1, 2, 3, 4, 5, 6, 7, 8, 9, 10, 11, 12, 13, 14, 15, 16, 17, 18, 19, 20, 21, 22, 23, 24, 25, 26, 27, 28, 29, 30, 31, 32, 33, 34, 35, 36, 37, 38, 39, 40, 41, 42, 43, 44, 45, 46, 47, 48, 49, 50, 51, 52, 53, 54, 55, 56, 57, 58, 59, 60, 61, 62, 63, 64, 65, 66, 67, 68, 69, 70, 71, 72, 73, 74, 75, 76, 77, 78, 79, 80, 81, 82, 83, 84, 85, 86, 87, 89, 90, 91, 92, 93, 94, 95, 96, 97, 98, 99, 100 or more than 100 carbons in length, subject to the common general knowledge of the person of skill in the art. Further, but without limitation, if unspecified, the size of a heteroalkyl may be 1, 2, 3, 4, 5, 6, 7, 8, 9, 10, 11, 12, 13, 14, 15, 16, 17, 18, 19, 20, 21, 22, 23, 24, 25, 26, 27, 28, 29, 30, 31, 32, 33, 34, 35, 36, 37, 38, 39, 40, 41, 42, 43, 44, 45, 46, 47, 48, 49, 50, 51, 52, 53, 54, 55, 56, 57, 58, 59, 60, 61, 62, 63, 64, 65, 66, 67, 68, 69, 70, 71, 72, 73, 74, 75, 76, 77, 78, 79, 80, 81, 82, 83, 84, 85, 86, 87, 89, 90, 91, 92, 93, 94, 95, 96, 97, 98, 99, 100 or more than 100 carbons and heteroatoms in length, subject to the common general knowledge of the person of skill in the art.

[0282] For convenience, unless otherwise specified the term “alkyl” shall without limitation include “alkylenyl” unless the context of its use clearly excludes alkylenyls, and vice versa. For example, but without limitation, where R¹, R² and R³ in R¹-R²-R³ are identified as alkyl groups, it will be understood that R² is an alkylenyl group and, similarly, R¹ and R³ do not include alkylenyl groups.

[0283] As used herein, in the context of an alkyl/heteroalkyl group of a compound, the term “linear” may be used as it is normally understood to a person of skill in the art and generally refers to a chemical entity that comprises a skeleton or main chain that does not split off into more than one contiguous chain. Non-limiting examples of linear alkyls include methyl, ethyl, n-propyl, and n-butyl.

[0284] As used herein, the term “branched” may be used as it is normally understood to a person of skill in the art and generally refers to a chemical entity that comprises a skeleton or main chain that splits off into more than one contiguous chain. The portions of the skeleton or main chain that split off in more than one direction may be linear, cyclic or any combination thereof. Non-limiting examples of a branched alkyl group include tert-butyl and isopropyl.

[0285] As used herein, the term “saturated” when referring to a chemical entity may be used as it is normally understood to a person of skill in the art and generally refers to a chemical entity that comprises only single bonds. Non-limiting examples of a saturated C1-C₁₅ alkyl group may include methyl, ethyl, n-propyl, i-propyl, sec-propyl, n-butyl, i-butyl, sec-butyl, t-butyl, n-pentyl, i-pentyl, sec-pentyl, t-pentyl, n-hexyl, i-hexyl, 1,2-dimethylpropyl, 2-ethylpropyl, 1-methyl-2-ethylpropyl, I-ethyl-2-methylpropyl, 1,1,2-trimethylpropyl, 1,1,2-triethylpropyl, 1,1-dimethylbutyl, 2,2-dimethylbutyl, 2-ethylbutyl, 1,3-dimethylbutyl, 2-methylpentyl, 3-methylpentyl, sec-hexyl, t-hexyl, n-heptyl, i-heptyl, sec-heptyl, t-heptyl, n-octyl, i-octyl, sec-octyl, t-octyl, n-nonyl, i-nonyl, sec-nonyl, t-nonyl, n-decyl, i-decyl, sec-decyl and t-decyl. Non-limiting examples of C₂-C₁₅ alkenyl group may include vinyl, allyl, isopropenyl, l-propene-2-yl, 1-butene-1-yl, l-butene-2-yl, l-butene-3-yl, 2-butene-1-yl, 2-butene-2-yl, octenyl and decenyl. Non-limiting examples of C₂-C₁₅ alkynyl group may include ethynyl, propynyl, butynyl, pentynyl, hexynyl, heptynyl, octynyl, nonynyl and decynyl. Without limitation, the above-defined saturated C1-C₁₅ alkyls, C₂-C₁₅ alkenyls and C₂-C₁₅ alkynyls are all encompassed within the term “X₁-X₁₅ alkyl”, as used herein. Without limitation, the term “X₁-X₁₅ heteroalkyl” would encompass each of the above-defined saturated C1-C₁₅ alkyls, C₂-C₁₅ alkenyls and C₂-C₁₅ alkynyls, where one or more of the carbon atoms is independently replaced with a heteroatom. The person of skill in the art would understand that various combinations of different heteroatoms may be used.

[0286] Unless explicitly stated otherwise, the terms “aryl” and “heteroaryl” each includes any reasonable combination of the following: (1) cyclic or multi-cyclic (fused rings, multiple non-fused rings or a combination thereof); and (2) aromatic (i.e. unsaturated rings) or nonaromatic (i.e. saturated rings); and (3) unsubstituted or substituted. Non-limiting examples of aryls or heteroaryls (i.e. “aryl/heteroaryl”) include: phenyl, naphthyl, thienyl, indolyl, pyridyl and the like. If unspecified, the size of the aryl/heteroaryl is what would be considered reasonable to the person of skill in the art. For example, but without limitation, if unspecified, the size of an aryl may be 3, 4, 5, 6, 7, 8, 9, 10, 11, 12, 13, 14, 15, 16, 17, 18, 19, 20, 21, 22, 23, 24, 25, 26, 27, 28, 29, 30, 31, 32, 33, 34, 35, 36, 37, 38, 39, 40, 41, 42, 43, 44, 45, 46, 47, 48, 49, 50, 51, 52, 53, 54, 55, 56, 57, 58, 59, 60, 61, 62, 63, 64, 65, 66, 67, 68, 69, 70, 71, 72, 73, 74, 75, 76, 77, 78, 79, 80, 81, 82, 83, 84, 85, 86, 87, 89, 90, 91, 92, 93, 94, 95, 96, 97, 98, 99, 100 or more than 100 carbons in length, subject to the common general knowledge of the person of skill in the art. Further, but without limitation, if unspecified, the size of a heteroaryl may be 3, 4, 5, 6, 7, 8, 9, 10, 11, 12, 13, 14, 15, 16, 17, 18, 19, 20, 21, 22, 23, 24, 25, 26, 27, 28, 29, 30, 31, 32, 33, 34, 35, 36, 37, 38, 39, 40, 41, 42, 43, 44, 45, 46, 47, 48, 49, 50, 51, 52, 53, 54, 55, 56, 57, 58, 59, 60, 61, 62, 63, 64, 65, 66, 67, 68, 69, 70, 71, 72, 73, 74, 75, 76, 77, 78, 79, 80, 81, 82, 83, 84, 85, 86, 87, 89, 90, 91, 92, 93, 94, 95, 96, 97, 98, 99, 100 or more than 100 carbons and heteroatoms in length, subject to the common general knowledge of the person of skill in the art. It is noted that an aryl or heteroaryl may have all or only a portion of its skeleton or main chain bonded in such a way so as to form a ‘loop’, circle or ring of atoms bonded together. That is, the aryl/heteroaryl may comprise linear or branched chains of carbons/heteroatoms that are not part of a ring or loop.

[0287] As used herein, the term “substituted” is used as it would normally be understood to a person of skill in the art and generally refers to a compound or chemical entity that has one chemical group replaced with a different chemical group. Unless otherwise specified, a substituted alkyl may be an alkyl in which one or more hydrogen atom(s) may be/are replaced with one or more atom(s) that may be/are not hydrogen(s). For example, chloromethyl is a non-limiting example of a substituted alkyl, more particularly an example of a substituted methyl. Aminoethyl is another non-limiting example of a substituted alkyl, more particularly an example of a substituted ethyl. Unless otherwise specified, a substituted compound or group (e.g. alkyl, heteroalkyl, aryl, heteroaryl and the like) may be substituted with any chemical group reasonable to the person of skill in the art. For example, but without limitation, a hydrogen bonded to a carbon or heteroatom (e.g. N) may be substituted with halide (e.g. F, I, Br, CI), amide, oxo, hydroxyl, thiol, phosphate, phosphonate, sulfate, SO₂H, SO₃H, alkyls, heteroalkyls, aryl, heteroaryl, ketones, carboxaldehyde, carboxylates, carboxamides, nitriles, monohalomethyl, dihalomethyl, trihalomethyl.

[0288] As used herein, the term “unsubstituted” is used as it would normally be understood to a person of skill in the art. Non-limiting examples of unsubstituted alkyls include methyl, ethyl, tert-butyl, and pentyl. The expression “optionally substituted” is used interchangeably with the expression “unsubstituted or substituted”.

[0289] Although various embodiments of the invention are disclosed herein, many adaptations and modifications may be made within the scope of the invention in accordance with the common general knowledge of those skilled in this art. Such modifications include the substitution of known equivalents for any aspect of the invention in order to achieve the same result in substantially the same way. Numeric ranges are inclusive of the numbers defining the range, and inclusive of all numbers and fractions subsumed within the respective ranges. The word “comprising” is used herein as an open-ended term, substantially equivalent to the phrase “including, but not limited to”, and the word “comprises” has a corresponding meaning. Terms such as “consisting essentially of” and “consists essentially of” allow for elements not explicitly recited, but exclude elements that are found in the prior art or that affect a basic or novel characteristic of the invention. As used herein, the singular forms “a”, “an” and “the” include plural referents unless the context clearly dictates otherwise. Thus, for example, reference to “a thing” includes more than one such thing. Citation of references herein is not an admission that such references are prior art to the present invention. Any priority document(s) and all publications, including but not limited to patents and patent applications, cited in this specification are incorporated herein by reference as if each individual publication were specifically and individually indicated to be incorporated by reference herein and as though fully set forth herein. The invention includes all embodiments and variations substantially as hereinbefore described and with reference to the examples and drawings. Nothing herein is intended as a promise of any specific utility for all embodiments.

[0290] The term “about” or “approximately” as used herein when referring to a measurable value such as a parameter, an amount, a temporal duration, and the like, is meant to encompass variations of +/−20% or less, preferably +/−10% or less, more preferably +/−5% or less, and still more preferably +/−1% or less of and from the specified value, insofar such variations are appropriate to perform in the disclosed invention. It is to be understood that the value to which the modifier “about” or “approximately” refers is itself also specifically, and preferably, disclosed.

[0291] All references cited in the present specification are hereby incorporated by reference in their entirety. In particular, the teachings of all references herein specifically referred to are incorporated by reference, along with all documents cited in documents that are cited herein.

[0292] Standard reference works setting forth the general principles of recombinant DNA technology include Molecular Cloning: A Laboratory Manual, 2nd ed., vol. 1-3, ed. Sambrook et al., Cold Spring Harbor Laboratory Press, Cold Spring Harbor, N.Y., 1989; Current Protocols in Molecular Biology, ed. Ausubel et al., Greene Publishing and Wiley-lnterscience, New York, 1992 (with periodic updates) (“Ausubel et al. 1992”); the series Methods in Enzymology (Academic Press, Inc.); Innis et al., PCR Protocols: A Guide to Methods and Applications, Academic Press: San Diego, 1990; PCR 2: A Practical Approach (M. J. MacPherson, B. D. Hames and G. R. Taylor eds. (1995); Harlow and Lane, eds. (1988) Antibodies, a Laboratory Manual; and Animal Cell Culture (R. I. Freshney, ed. (1987). General principles of microbiology are set forth, for example, in Davis, B. D. et al., Microbiology, 3rd edition, Harper & Row, publishers, Philadelphia, Pa. (1980).

[0293] Reference throughout this specification to “one embodiment” or “an embodiment” means that a particular feature, structure or characteristic described in connection with the embodiment is included in at least one embodiment of the present invention. Thus, appearances of the phrases “in one embodiment” or “in an embodiment” in various places throughout this specification are not necessarily all referring to the same embodiment, but may. Furthermore, the particular features, structures or characteristics may be combined in any suitable manner, as would be apparent to a person skilled in the art from this disclosure, in one or more embodiments. Furthermore, while some embodiments described herein include some but not other features included in other embodiments, combinations of features of different embodiments are meant to be within the scope of the invention, and form different embodiments, as would be understood by those in the art. For example, in the appended claims, any of the claimed embodiments can be used in any combination.

[0294] In this description of the invention, reference is made to the accompanying drawings that form a part hereof, and in which are shown by way of illustration only of specific embodiments in which the invention may be practiced. It is to be understood that other embodiments may be utilized and structural or logical changes may be made without departing from the scope of the present invention. The description, therefore, is not to be taken in a limiting sense, and the scope of the present invention is defined by the appended claims.

[0295] It is an object of the invention to not encompass within the invention any previously known product, process of making the product, or method of using the product such that Applicants reserve the right and hereby disclose a disclaimer of any previously known product, process, or method. It is further noted that the invention does not encompass any product, process, or making of the product or method of using the product, which does not meet the written description and enablement requirements of the USPTO (35 U.S.C. § 112, first paragraph) or the EPO (Article 83 of the EPC), such that Applicants reserve the right and hereby disclose a disclaimer of any previously described product, process of making the product, or method of using the product.

[0296] Preferred statements (features) and embodiments may be combined with any other features or embodiments unless clearly indicated to the contrary. In particular, any feature indicated as being preferred or advantageous may be combined with any other feature or features or statements indicated as being preferred or advantageous.

### PROTOCOL EXAMPLES

[0297] High Throughput Screening

[0298] Digital droplet PCR: DNA libraries were diluted in 200 μg/mL yeast total RNA solution (Ambion) down to ˜8 template DNA molecules per picoliter to have X=0.2, or 40 templates DNA molecules per picoliter. 1 μL of this dilution was then introduced in 100 μL of a PCR mixture containing 0.2 μM of Forward primer (5′-CTT TAA TAC GAC TCA CTA TAG GAA CCC GCA AGC CAT C (SEQ ID NO: 6900), 0.2 μM of Reverse primer (5′-CAG AAT CTC ACA CAG CC(SEQ ID NO: 6901)), 0.2 mM of each dNTP, 0.67 mg/mL Dextran-Texas Red 70 kDa (Molecular Probes), 0.1% Pluronic F68, Phire II DNA polymerase (Thermo-Scientific) and the corresponding buffer according to recommended concentrations. The mixture was loaded in a length of PTFE tubing and infused into a droplet generator microfluidic device where it was dispersed into 2.5 μL droplets (production rate of ˜12,000 droplets/second) carried by HFE 7500 fluorinated oil (3M) supplemented with 3% of a fluorosurfactant. Droplet production frequency was monitored and used to determine droplet volume by adjusting pumps flow rates (MFCS, Fluigent). Emulsions were collected in 0.2 μL tubes, and subjected to an initial denaturation step of 2 min at 95° C. followed by 30 PCR cycles of: 30 sec at 95° C., 30 sec at 55° C., 1 min 30 at 72° C.

[0299] Droplet fusion: PCR droplets were then injected into a fusion device at a rate of ˜1,500 droplets/second, spaced by a stream of HFE 7500 fluorinated oil supplemented with 2% fluorosurfactant. Each PCR droplet was synchronized with a 16 pL in vitro transcription (IVT) droplet containing 2.2 mM of each NTP (Larova), 24 mM MgCl₂, 44 mM Tris-HCl pH 8.0, 50 mM KCl, 5 mM DTT, 1 mM Spermidine, 35 μg/mL of Dextran-Texas Red 70 kDa (Molecular Probes), 0.1% Pluronic F68, 20 μg/mL T7 RNA polymerase (purified in the laboratory), 100 nM TO1-Biotin (Dolgosheina et al., 2014), 1 μg inorganic pyrophosphatase (Roche) supplemented with the desired concentration of NMM. For the screenings performed in the presence of TO3-Biotin (Dolgosheina et al., 2014), the T7 RNA polymerase (New England Biolabs) concentration was reduced to 70 U per reaction. The IVT mixture was loaded in a length of PTFE tubing that was kept on ice during all the experiment. IVT droplets were produced using a stream of HFE 7500 fluorinated oil supplemented with 2% (w/w) of fluorinated surfactant. Flow-rates (MFCS, Fluigent) were adjusted to generate 16 pL IVT droplets and maximize the synchronization of one PCR droplet with one IVT droplet. Pairs of droplets were then fused with an AC field (350 V at 30 kHz) and the resulting emulsion collected off-chip and incubated for 120 min (high concentration of T7 RNA polymerase, NMM screenings) or 30 min (low concentration of T7 RNA polymerase, TO3-Biotin screenings) at 37° C.

[0300] Droplet analysis and sorting: The emulsion was finally re-injected into an analysis and sorting microfluidic device mounted on a Thermo plate (Tokai Hit) holding the temperature at 45° C. as previously described³. Droplets were re-injected at a frequency of ˜200 droplets/second, spaced with a stream of surfactant-free HFE 7500 fluorinated oil. The green fluorescence (TO1-Biotin in complex with the aptamer) of each droplet was analysed and the droplets having the highest green fluorescence were sorted. The gated droplets were deflected into collecting channel by applying a 1 ms AC field (1200 V, 30 kHz) and collected into a 1.5 mL tube. Collected droplets were recovered by flushing 200 μL of HFE 7500 fluorinated oil (3M) through the tubing. 100 μL of 1H, 1H, 2H, 2H-perfluoro-1-octanol (Sigma-Aldrich) and 200 μL of 200 μg/mL yeast total RNA solution (Ambion) were then added, the droplets were broken by vortexing the mixture and DNA-containing aqueous phase was recovered.

[0301] Quantification of RNA Produced in Droplets

[0302] A PCR mixture supplemented with DNA coding for RNA Mango (λ=10, ensuring that all the droplets were occupied) was emulsified in 2.5 pL droplets and the DNA amplified as above. The droplets were paired and fused with droplets of in vitro transcription mixture containing either a low (70 U of enzyme from New England Biolabs) or a high (20 μg/mL of enzyme purified in the lab) concentration of T7 RNA polymerase and the resulting emulsions were incubated for respectively 30 min or 120 min at 37° C. After incubation, the RNA-containing phase was recovered using 1H, 1H, 2H, 2H-perfluoro-1-octanol (Sigma-Aldrich) and the transcription was stopped by a phenol extraction followed by an ethanol precipitation in the presence of 300 mM sodium acetate pH 5.5 (Sigma-Aldrich). After centrifugation and a wash in 70% ethanol, the pellets were re-suspended in water. 10 U of Baseline-Zero™ DNase (Epicentre) and the corresponding buffer were added and a second incubation of 60 min at 37° C. was performed. The DNase was removed by phenol extraction and RNA recovered by ethanol precipitation.

[0303] Recovered RNAs, were reverse transcribed for 60 min at 55° C., followed by 5 min at 95° C., in a mixture containing 10 pmol of Reverse primer, 0.5 mM of each dNTPs RT Maxima (Thermo-Scientific) and the corresponding buffer according to recommended concentrations. The cDNA was amplified using SsoFast™ Evagreen supermix (Bio-Rad) supplemented with 0.2 μM of each primer (Forward and Reverse) using a CFX96 Touch™ Real TimePCR Detection System (Bio-Rad). Finally the cDNA was quantified using the calibration curve obtained with reactions performed with purified RNAs.

[0304] Enrichment Measurement

[0305] The pool molecules contained in 2 μL recovered from the sorted fractions were introduced into 100 μL of PCR mixture containing 0.1 μM of each primer (Fwd and Rev), 0.2 mM of each dNTP, 0.05 U/μL of DreamTaq™ and its corresponding buffer (Fermentas). The mixture was then subjected to an initial denaturation step of 30 sec at 95° C., followed by 20 cycles of: 5 sec at 95° C. and 30 sec at 60° C. 20 μL of PCR products were then in vitro transcribed in 250 μL of mixture containing 2 mM of each NTP, 25 mM MgCl₂, 40 mM Tris-HCl pH 8.0, 5 mM DTT, 1 mM Spermidine and 70 μg/mL T7 RNA polymerase. After 4 hours of incubation at 37° C., 10 U of Baseline-Zero™ DNase (Epicentre) and the corresponding buffer were added and the mixture was incubated for 60 min at 37° C. RNAs were recovered by phenol extraction followed by an ethanol precipitation in the presence of 300 mM sodium acetate pH 5.5 (Sigma-Aldrich). After centrifugation and a wash in 70% ethanol, the pellets were dissolved in denaturing loading buffer (0.05% bromophenol blue, 0.05% xylene cyanol, 20% glycerol, 1×TBE, 8 M urea) and the solution loaded onto a 12% denaturing 8 M urea acrylamide/bisacrylamide gel. The piece of gel containing RNA was identified by UV shadowing, sliced from the gel and transferred into a dialyze tube (MWCO=3 500, Spectrum Lab) filled with TBE. RNA was electro-eluted by placing the montage in TBE for 60 min at 100 V. Eluted RNA were filtered in centrifuge tube (porosity 0.45 μm, VWR) and ethanol precipitated in the presence of 300 mM sodium acetate pH 5.5. After centrifugation and a wash in 70% ethanol, the pellets were dissolved in DEPC-Treated water and quantified with Nanodrop (Thermo Scientific).

[0306] In the case of NMM screenings, 2 μM of RNA were incubated with 100 nM of TO1-Biotin in 40 mM Tris-HCl pH 8.0, 50 mM KCl, and 22 mM MgCl₂. Eventually, NMM (3 μM) was added and TO1-Biotin fluorescence (ex. 492 nm/em. 516 nm) measured. In the case of TO3-Biotin screenings, 300 nM of RNA and 100 nM of TO1-Biotin were used with or without 1.6 μM of TO3-Biotin. Both green (ex. 492 nm/em. 516 nm) and red (ex. 635 nm/em. 665 nm) fluorescence were measured.

[0307] TA-Cloning, Sequencing and Colony Screening

[0308] Genes contained in the libraries were diluted in a PCR mixture as a immediately above and thermocycled 25 times using a final extension step of 10 min at 72° C. PCR products were inserted in pTZ57R/T vector following manufacturer's instruction (InsTAclone PCR cloning Kit, Thermo-Scientific). Ligation products were recovered by phenol/chloroform extraction and 100 ng of DNA used to transform Electro-10 blue bacteria (Agilent) placed in a 2 mm electroporation (MicroPulser, Bio-Rad). After an hour of recovery at 37° C. under agitation, bacteria were plated on Luria broth (LB)-Ampicillin agar plate and incubated overnight at 37° C. The colonies were picked, used to inoculate liquid LB and grown at 37° C. until saturation. Plasmids DNA were extracted using “GeneJet Plasmid Miniprep kit” (Thermo-Scientific), and sequences determined by Sanger approach (GATC Biotech).

[0309] Single colonies were introduced in 10 μL of a PCR mixture identical to that used for TA-cloning and the DNA amplified as above. 2 μL of PCR product added to 18 μL of in vitro transcription mixture containing 2 mM of each NTP, 25 mM MgCl₂, 40 mM Tris-HCl pH 8.0, 50 mM KCl, 5 mM DTT, 1 mM Spermidine, 70 μg/mL T7 RNA polymerase and 100 nM TO1-Biotin. The mix was then split in two and one aliquot was supplemented with 3 μM of NMM. The reaction was incubated in a real-time thermocycler (Mx 3005P, Agilent) for 2 hours at 37° C. and the green fluorescence (ex. 492 nm/em. 516 nm) measured every minute.

[0310] DMS Probing of Mangos

[0311] DMS (Denaturing): Protocol is adapted from Lorsch and Szostak, 1994¹³. 50 nM RNA was 3′ end labelled with ³²pCp and gel purified. The resulting RNA was incubated in 50 mM HEPES pH 7.5 (volume 50 μL) at room temperature for 30 min. After incubation, 10 μg carrier RNA was added. The sample was then heated to 90° C. for 3 min before the addition of 0.5 μL of 25% DMS (diluted in ethanol) and heated to 80° C. for 1 min. 150 μL ice cold ethanol+5 μL 3 M NaCl was then immediately added and moved to −20° C. for 30 min. DMS modified RNA was pelleted by centrifuge at 16,300 RCF at 4° C. for 20 min.

[0312] DMS (Native): 50 nM 3′ end labeled RNA was incubated in 50 mM HEPES pH 7.5, 1 mM MgCl₂, 140 mM either KCl or NaCl, with or without 500 nM TO1-Biotin (final volume 50 μL) at room temperature for 30 min. After incubation, 10 μg carrier RNA was added. The sample was then incubated at room temperature for 15 min after the addition of 0.5 μL of 100% DMS. 150 μL ice cold ethanol+5 μL 3 M NaCl was then immediately added and pelleted as for the denaturing DMS protocol.

[0313] Reduction: Pellets were resuspended in 10 μL 1 M Tris buffer pH 8 and 10 μL of freshly prepared 0.2 M sodium borohydride was added. Reaction was carried out on ice and in the dark for 30 min. Reactions were stopped by ethanol precipitation as above.

[0314] Aniline Cleavage: To the resulting pellet, 20 μL (1 part Aniline, 7 parts ddH₂O, 3 parts glacial acetic acid) were added and incubated at 60° C. for 15 min in the dark. Samples were flash frozen by placing tubes in liquid nitrogen and lyophilized by speed vacuum centrifuge. Once dry, 20 μL ddH₂O was added, the sample refrozen and lyophilized once again. The pellet was resuspended in a 50% formamide denaturing solution before being loading on a 15% polyacrylamide gel (19:1 acrylamide:bis).

[0315] T1 RNase Ladder and Alkaline Hydrolysis Ladder:

[0316] 200 pmol 3′ end labeled RNA was incubated in 20 mM sodium citrate, 6.3 M urea, and 1 U/μL T1 RNase (Thermo Scientific) at 50° C. for 10 min. Samples was flash frozen in liquid nitrogen for 5 min, heat denatured in denaturing solution at 95° C. for 5 min prior to gel loading. Hydrolysis ladders were generated by incubating in 50 mM NaHCO₃ at 90° C. for 20 min and neutralizing using 0.17 M Tris-HCl.

[0317] Screening for Minimal Functional Mango Motifs

[0318] To identify the minimal functional motif of each Mango, truncated constructs were designed as shown in FIG. 9. DNA constructs (IDT) were transcribed by run-off transcription using T7 RNA polymerase. RNA was gel purified on 10% polyacrylamide gels. RNA concentrations were determined by NanoDrop readings at A₂₆₀, where extinction coefficients were estimated based on average 11,000 M⁻¹ cm⁻¹ per base.

[0319] Affinity Measurements of Mango Variants

[0320] Fluorescence data was gathered using a Varian Cary Eclipse Spectrophotometer unless otherwise stated. Fluorescent titrations in the in vivo mimicking buffer (WB: 140 mM KCl, 1 mM MgCl₂, 10 mM NaH₂PO₄ pH 7.2, 0.05% Tween-20) were performed to determine binding affinities. Fluorescence was measured at the maximum excitation and emission wavelengths of each complex (FIG. 13). Curves were fitted using least squares (Kaleidagraph 4.5) using the following equation for TO1-Biotin:

F([RNA])=Fₘₐₓ[(K_{D}+[RNA]+[Fluorophore])/2−√(([RNA]−[Fluorophore])2+K_{D}(K_{D}+2[RNA]+2[Fluorophore]))]/2+F_{unbound} (Eq. 1)

[0321] Where F([RNA]) is the fluorescence as a function of RNA concentration [RNA], Fₘₐₓ is the maximal fluorescence of the bound complex and F_{unbound} the fluorescence of the unbound fluorophore. When the fluorescence of F_{unbound}was undetectable, it was set to zero.

[0322] Or to the following equation for TO3-Biotin and NMM experiments:

F([RNA])=Fₘₐₓ[RNA]/(K_{D}+[RNA])+F_{unbound} (Eq. 2)

[0323] Fₘₐₓ was determined using Eq. 1 or Eq. 2 as appropriate.

[0324] Temperature Dependent Fluorescence and UV Melting Curves

[0325] Temperature dependence measurements were started at 90° C. decreasing at a rate of 1° C./min until 20° C., then returned at 1° C./min until 90° C. was reached. Fluorescence measurements were obtained at the maximum excitation/emission of the fluorescent complex used and were measured in WB buffer using 1 μM RNA either with or without 5 μM TO1-Biotin. Temperature dependence of fluorescence and absorbance were measured using a Varian Cary Eclipse Fluorescence Spectrophotometer at excitation and emission peaks and a Varian Cary 100 Bio UV-visible spectrophotometer monitoring at 260 nm.

[0326] Circular Dichroism

[0327] Circular dichroism spectra were obtained on an Applied Photophysics Chirascan Circular Dichroism Spectrometer using 5 μM RNA, 140 mM monovalent salts and 7 μM TO1-Biotin. Spectra were scanned in 1 nm steps with a bandwidth of 1 nm. Data shown is the average of three repeats. Samples were measured using a 1 mm pathlength quartz cuvette (Starna Cells Inc.).

[0328] Formaldehyde Resistance Assay

[0329] RNA Mango aptamers were incubated with TO1-Biotin in WB buffer for at least one hour until equilibrium fluorescence was reached. Formaldehyde was then added such that final concentrations after dilution were 50 nM RNA, 100 nM TO1-Biotin and 0, 2, 4, or 8% formaldehyde. Fluorescence was measured as a kinetic run at a rate of 2 readings per minute using a Varian Cary Eclipse Fluorescence Spectrophotometer, ex/em=510±2.5/535±5 nm.

[0330] Cell Culture and Maintenance

[0331] HEK293T cells were grown in Dulbecco Modified Eagle's Medium containing 10% Fetal Bovine Serum, 2 mM D-Glucose, 2 mM L-Glutamine, 1 mM Sodium Pyruvate and 100 U/ml Penicillin/Streptomycin (Thermo Fisher) and maintained at 37° C. with 5% CO₂ in a humidified incubator. Cells used for imaging were cultured in Ibidi glass bottomed 8-well chamber slides (Ibidi GmbH). 5S-Mango RNA synthesis and purification DNA encoding the F30 folding scaffold was modified to incorporate the Mango RNA sequences and ordered from (Intergrated DNA Technologies). The DNA was amplified by PCR to incorporate 5′ Sail and 3′ XbaI restriction sites. PCR products were digested using Fast Digest enzymes (Thermo Fisher) and ligated into SalI/XbaI linearized and Shrimp Alkaline Phosphotase (NEB) treated pAV5S-F30-2xdBroccoli (Addgene plasmid 66845, a gift from Dr S. Jaffrey). DNA encoding the full 5S-F30-Mango sequence was PCR amplified and a 5′ T7 RNA polymerase promoter introduced. DNA was transcribed in vitro with T7 RNA polymerase (NEB) at 37° C. for 16 h in 40 mM Tris-HCl, 30 mM MgCl₂, 2 mM spermidine, 1 mM dithiothreitol, 5 mM rNTPs, 1 U/μl E. coli inorganic pyrophosphotase, 4 U/μl T7 RNA polymerase (pH 7.9). RNA was purified from an 8 M urea denaturing polyacrylamide and bis to acrylamide ratios here XX gel followed by elution in RNA elution buffer (40 mM Tris-HCl pH 8.0, 0.5 M sodium acetate, 0.1 mM EDTA) and ethanol precipitation. Fluorescence measurements were taken for each of the RNA constructs using a Varian Cary Eclipse Fluorescence Spectrophotometer (Agilent) containing 40 nM TO1-Biotin, 200 nM RNA, 10 mM Sodium Phosphate, 100 mM KCl and 1 mM MgCl₂ at pH 7.2. Similar measurements were also taken with a limiting amount of RNA (40 nM) in an excess of TO1-Biotin (200 nM) and the results showed a similar trend.

[0332] 5S-Mango RNA Synthesis and Transfection

[0333] RNA was transfected directly into 8-well chamber slides using the Lipofectamine-based CRISPRMAX reagent following the manufacturers guidelines (Invitrogen). Initially 125 nM RNA containing 10 mM Sodium Phosphate buffer (pH 7.2), 100 mM KCl and 1 mM MgCl₂ was incubated at room temperature followed by a 1:1 dilution in OptiMEM prior to transfection. The RNA transfected was incubated at 37° C. for 1 hour in complete growth medium.

[0334] Cell Fixation and Immunostaining

[0335] Cells were fixed in PBS containing 4% paraformaldehyde for 10 min on ice (Thermo Fisher) followed by permeabilization in 0.2% Triton X-100 for 10 min at room temperature. Cells were first blocked (2% BSA in PBS) for 30 min followed by primary antibody (1:50-1:500 dilutions) incubation for 120 min in blocking solution.

[0336] Primary antibodies used here were: Anti-Ribosomal Protein S6 (MAB5436, R&D Systems), Anti-ATP5B (ab14730, Abcam), Anti-GW182 (ab7052, Abcam), Anti-EEA-1 (ab70521, Abcam), Anti-LSm3 (NBP2-14206, Novus Biologicals), Anti-TIAR (sc-398372, Santa Cruz). Secondary antibodies used were Donkey Anti-mouse and Donkey Anti-Rabbit Alexa Fluor 680 (Molecular Probes).

[0337] Primary antibodies were washed three times for 20 min each in blocking solution followed by incubation with secondary antibody at 1:500 dilution for 60 min, which was subsequently washed as above. After immunostaining the cells were washed three times for 5 min each with PKM buffer (10 mM Sodium Phosphate, 100 mM KCl and 1 mM MgCl₂) followed by a 10 min incubation in 200 nM TO1-Biotin diluted in PKM buffer before replacing with imaging media (10 mM Sodium Phosphate, 100 mM KCl and 1 mM MgCl₂ 1 μg/ml Hoechst 33258).

[0338] Live-Cell Imaging and Fluorescence Microscopy

[0339] To visualize the nuclear boundary in live cells, a plasmid expressing a fluorescently tagged histone protein (EBFP2-H2B-6, Addgene plasmid 55243) was transfected using FuGene 6 (Promega) 24 h prior to RNA transfection. RNA was transfected directly into 8-well chamber slides (Ibidi GmbH) as described above, with an additional pre-incubation step with 250 nM of TO1-Biotin prior to the addition of the CRISPRMAX transfection reagent. Following incubation of the RNA transfection, the cells were washed once with PBS and replaced with live-cell imaging media (Fluorobrite DMEM supplemented with 20 mM HEPES, Invitrogen). Live and fixed cell images were taken using a Zeiss Elyra wide-field microscope by exciting at 405 nm (Blue), 488 nm (Green) and 642 nm (Far-Red) and detecting at 420-480 nm, 495-550 nm and >650 nm, respectively. Live cells were maintained at 37° C. with 5% CO₂ in a stage top incubator (Tokai Hit). Images were processed using FIJI and spot detection analysis was performed on each maximum projection by the spot detector plugin in the ICY image analysis software, which detects significant foci with a pixel area ≥3×3 pixels.

### REFERENCES

[0340] 1. Nicoludis, J. M. et al. Optimized End-Stacking Provides Specificity of N-Methyl Mesoporphyrin IX for Human Telomeric G-Quadruplex DNA. J. Am. Chem. Soc. 134, 20446-20456 (2012).
[0341] 2. Dolgosheina, E. V. et al. RNA Mango Aptamer-Fluorophore: A Bright, High-Affinity Complex for RNA Labeling and Tracking. ACS Chem. Biol. 9, 2412-2420 (2014).
[0342] 3. Autour, A., Westhof, E. & Ryckelynck, M. iSpinach: a fluorogenic RNA aptamer optimized for in vitro applications. Nucleic Acids Res. 44, 2491-2500 (2016).
[0343] 4. Warner, K. D. et al. Structural basis for activity of highly efficient RNA mimics of green fluorescent protein. Nat. Struct. Mol. Biol. 21, 658-663 (2014).
[0344] 5. Huang, H. et al. A G-quadruplex-containing RNA activates fluorescence in a GFP-like fluorophore. Nat. Chem. Biol. 10, 686-691 (2014).
[0345] 6. Shaner, N. C., Steinbach, P. A. & Tsien, R. Y. A guide to choosing fluorescent proteins. Nat. Methods 2, 905-909 (2005).
[0346] 7. Jeng, S. C. Y., Chan, H. H. Y., Booy, E. P., McKenna, S. A. & Unrau, P. J. Fluorophore ligand binding and complex stabilization of the RNA Mango and RNA Spinach aptamers. RNA (2016). doi:10.1261/rna.056226.116
[0347] 8. Paige, J. S., Wu, K. Y. & Jaffrey, S. R. RNA Mimics of Green Fluorescent Protein. Science 333, 642-646 (2011).
[0348] 9. Filonov, G. S., Kam, C. W., Song, W. & Jaffrey, S. R. In-Gel Imaging of RNA Processing Using Broccoli Reveals Optimal Aptamer Expression Strategies. Chem. Biol. 22, 649-660 (2015).
[0349] 10. Karunatilaka, K. S. & Rueda, D. Post-transcriptional modifications modulate conformational dynamics in human U2-U6 snRNA complex. RNA 20, 16-23 (2014).
[0350] 11. Smirnov, A., Entelis, N., Martin, R. P. & Tarassov, I. Biological significance of 5S rRNA import into human mitochondria: role of ribosomal protein MRP-L18. Genes Dev. 25, 1289-1305 (2011).
[0351] 12. Ryckelynck, M. et al. Using droplet-based microfluidics to improve the catalytic properties of RNA under multiple-turnover conditions. RNA 21, 458-469 (2015).
[0352] 13. Lorsch, J. R. & Szostak, J. W. In vitro selection of RNA aptamers specific for cyanocobalamin. Biochemistry (Mosc.) 33, 973-982 (1994).

### EXAMPLES

### Example 1: Crystal Structures of the Mango-II RNA Aptamer Reveal Heterogeneous Fluorophore Binding and Guide Engineering of Variants with Improved Selectivity and Brightness

[0353] Several aptamers that induce fluorescence of their cognate small molecules by >1000-fold, and that can be used in vivo as RNA analogues of fluorescent proteins have been described.1-3 Among these, RNA Mango is noteworthy because of its small size (<30 nucleotides) and its high affinity for the thiazole orange-derived fluorophore, TO1-Biotin (Kd=3.1 nM). Moreover, its complex with the related fluorophore TO3-Biotin (Kd=8 nM) is one of the most red-shifted fluorogenic tags described to date, having an emission maximum of longer wavelength than the fluorescent protein mPlum.4 The Co-crystal structure of RNA Mango revealed a three-tiered G-quadruplex. TO1-Biotin binds on one of its flat faces, with each of its three heterocylces, benzothiazole (BzT), mehtylquinoline (MQ) and biotin sequestered under an unpaired nucleotide.5,6

[0354] Mango-II was recently obtained by subjecting the final pool of the RNA Mango selection to compartmentalization coupled to fluorescence sorting.7 Compared to the original aptamer (hereafter Mango-I), the new RNA is brighter (11,000 M-1 cm-1 vs. 17,000 M-1 cm-1 for Mango-I and Mango-II, respectively), and binds to both TO1-Biotin and TO3-Biotin (FIG. 35A) with higher affinity (Kd=1.1±0.3 nM and 1.4±0.3 nM, respectively). To elucidate the structural basis for the enhanced properties of Mango-II, and as a starting point for structure-guided engineering, we have now determined its co-crystal structures in complex with TO1-Biotin (FIG. 35B,C) and TO3-Biotin (FIG. 36) at 2.9 Å and 3.0 Å resolution, respectively (Table 6).

TABLE 6
Summary of crystallographic statistics

| | Mango-II-TO1 | | Mango-II-TO3 | |
|---|---|---|---|---|
| Data collection | | | | |
| Space group | C222₁ | | C222₁ | |
| Cell dimensions | | | | |
| a, b, c (Å) | 36.83, 182.41, 107.49 | | 37.10, 181.76, 108.290 | |
| α, β, γ (°) | 90, 90, 90 | | 90, 90, 90 | |
| Resolution (Å) | 107.49-2.57 | (2.68-2.57)^{a} | 46.52-2.99 | (3.2-2.99)^{a} |
| R_{merge} | 0.058 | (>1) | 0.098 | (0.93) |
| <I>/<σ(I)> | 18.6 | (0.9) | 16.4 | (0.5) |
| Completeness (%) | 98.8 | (90.0) | 99.8 | (99.6) |
| Redundancy | 8.8 | (7.9) | 10.5 | (4.1) |
| Refinement | | | | |
| Resolution (Å) | 91.21-2.90 | (2.99-2.90) | 46.52-3.00 | (3.19-3.00) |
| No. reflections | 15464 | (1257) | 7735 | (1268) |
| R_{work}/R_{free} | 18.58/23.06 | | 18.99/25.51 | |
| No. atoms | 2453 | | 2339 | |
| RNA | 2283 | | 2283 | |
| TO1-Biotin | 162 | | 48 | |
| Ions | 8 | | 8 | |
| Water | 0 | | 0 | |
| B-factors (Å²) | 75.32 | | 57.38 | |
| RNA | 75.29 | | 57.53 | |
| TO1-Biotin | 75.95 | | 51.52 | |
| Ions | 62.0 | | 42.42 | |
| Water | N.A. | | N.A. | |
| R.m.s deviations | | | | |

| | | |
|---|---|---|
| Bond lengths (Å) | 0.007 | 0.006 |
| Bond angles (°) | 1.437 | 1.200 |

^{a}Values in parentheses are for highest-resolution shell.
One crystal was used for each data set.

[0355] The two complexes crystallized in similar unit cells with three crystallographically independent RNAs (chains A, B, C) in the asymmetric unit (A.U.). Overall, the three RNAs in each structure are very similar (rmsd ˜0.7 Å for all non-hydrogen RNA atoms), and so are the RNAs in complex with the two different fluorophores (rmsd ˜0.2 Å between the best-ordered chains in each structure; the coordinate precisions of the two structures are 0.42 Å and 0.40 Å, respectively). The folds of Mango-I and Mango-II are overall similar, and this similarity extends to crystal packing, in which adjacent aptamers stack pairwise through their fluorophore-distal quadruplex faces. Nonetheless, and as in the case of Mango-II, analytical ultracentrifugation indicates the aptamer RNA is monomeric in solution (FIG. 37).

[0356] Mango-II has an almost identical melting profile in both the presence and absence of TO1-Biotin and is more thermostable than Mango-1.7 In addition, Mango-II is remarkably formaldehyde resistant; Mango-II reacted with formaldehyde, can still bind and induce fluorescence of TO1-Biotin. Together, these data suggest that the Mango-II aptamer has a pre-organized binding pocket.

[0357] Three structural differences between Mango-I and Mango-II are consistent with a higher stability of the latter RNA and its improved fluorophore affinity. First, each guanine in the T3 G-quartet is isolated from the T2 G-quartet by one of four adenine containing propeller loops (FIG. 38B). This approximate four-fold rotational symmetry is lacking in Mango-I where one T3 guanine buckles 30° out of plane of the other guanines.5 Second, the GAA\hat{ }A junction between the P1 duplex and the quadruplex of Mango-II appears to have more hydrogen bonding interactions than that of Mango-I (FIG. 51). Consistent with a higher stability of the Mango-II junction, all P1 helices in the A.U. are crystallographically resolved. In contrast, only one of the two P1s in the Mango-I A.U. exhibited electron density. Third, the T1 G-quartet (distal from the fluorophore) of Mango-II is augmented into a hexad by two adenines, A14 and A25 (FIG. 38A). The corresponding T1 in Mango-I is augmented by one adenine into only a pentad. 5 The higher stability of Mango-II may reflect the higher temperature at which it was selected (45° C. vs. 37° C. for Mango-I).

[0358] The five adenines in the four propeller loops and the planar T3 quadruplex they create together define the fluorophore binding pocket of Mango-II. In this complex, the MQ and BzT of TO1-Biotin are coplanar and, in chains A and B, stack on G13 and G29 of T3, respectively (FIG. 39A). The binding modes of the headgroup of the fluorophore in the Mango-I and Mango-II complexes are near-mirror images. When seen from above the plane of T3, the BzT and MQ heterocycles are arranged clockwise and counter-clockwise in the two structures, respectively. As a result, the long axes of the BzT and MQ heterocycles are parallel and perpendicular to those of the T3 guanines on which they stack in the Mango-I and Mango-II complexes, respectively (ref. 5, FIG. 40). The perpendicular stacking arrangement is also present in chain C of the Mango-II structure but the heterocycles of the fluorophore are rotated by 90° around the 4-fold symmetry axis of the G-quartet with respect to that found in the A and B chains (FIG. 39B). Concomitant with this rotation, four of the flap adenines of chain C of the A.U. (A17, A22, A23, and A28) adopt different conformations from those of chains A and B (FIG. 3B). A17 reorients from anti to syn; A22 and A28 become disordered; and A23 reorients from syn to anti. In additional contrast to the Mango-I structure, electron density for atoms 1′ through 7′ of the PEG linker is coplanar with the T3 guanine layer, with the biotin moiety being disordered in all three complexes. The increased coplanarity of the TO1 heterocycles is consistent with the higher quantum yield of Mango-III-TO1-Biotin complex (0.21 vs. 0.14 for the corresponding Mango-I complex).

[0359] In the structure of Mango-II bound to TO3-Biotin, electron density corresponding to the fluorophore was only observed for the headgroup (BzT, MQ, and the trimethine linker), and only in RNA chains A and B (FIG. 39 C,D). Notably, in the two chains with bound TO3-Biotin, the nucleobase of A22 stacks directly on G24 of T3. In chain B, A22 also is in van der Waals contact with the methine linker of TO3-Biotin. These interactions may further stabilize the complex, and the packing of A22 observed in chain B may directly promote fluorescence of TO3-Biotin by stabilizing a coplanar conformation BzT, MQ, and the extended methine linker of this fluorophore.

[0360] Highly selective fluorogenic RNAs would facilitate development of orthogonal fluorescent tags. The structural heterogeneity revealed by our Mango-II TO1-Biotin and TO3-Biotin co-crystal structures, as well as the comparable affinity of the aptamer for the two fluorophores, suggests that the fluorophore binding pocket of this aptamer is not highly stereoselective. To increase selectivity of Mango-II, we constructed mutants focusing on residue A22, which in our structures is conformationally plastic and appeared to have the most potential to influence TO3-Biotin discrimination. Mutants were analyzed for affinity and fluorescence enhancement of TO1-Biotin and TO3-Biotin (Table 8 & 9). Mutation to guanine reduced the binding affinity and fluorescence enhancement of both TO1-Biotin and TO3-Biotin (Table 8 & 9). Such an outcome is not unexpected, as G-quadruplex nucleic acids can undergo alternative folding when additional guanine bases are present.8 However, mutation to uridine or cytosine maintained the binding affinity for TO1-Biotin (0.9 nM) while decreasing the affinity of TO3-Biotin from ˜1.4 nM to ˜5.0 nM (Table 8 & 9). Unexpectedly, these mutations also increased the fluorescence enhancement of TO1-Biotin by 18% while decreasing the fluorescence enhancement of TO3-Biotin by 25% (Table 8 & 9).

TABLE 7
Summary of crystallographic statistics

| | Mango-II-A22U-TO1 | |
|---|---|---|
| Data collection | | |
| Space group | C222₁ | |
| Cell dimensions | | |
| a, b, c (Å) | 36.86, 181.03, 109.06 | |
| α β, γ (°) | 90, 90, 90 | |
| Resolution (Å) | 46.38-2.80 | (2.95-2.80)^{a} |
| R_{merge} | 0.102 | (0.956) |
| <I>/<σ(I)> | 18.6 | (1.1) |
| Completeness (%) | 99.8 | (99.6) |
| Redundancy | 11.3 | (8.7) |
| Refinement | | |
| Resolution (Å) | 46.38-2.80 | (2.95-2.80) |
| No. reflections | 9216 | (1254) |
| R_{work}/R_{free} | 18.59/23.69 | |
| No. atoms | 2511 | |
| RNA | 2349 | |
| TO1-Biotin | 162 | |
| Ions | 8 | |
| Water | 0 | |
| B-factors (Å²) | 59.34 | |
| RNA | 59.37 | |
| TO1-Biotin | 58.74 | |
| Ions | 54.6 | |
| Water | N.A. | |
| R.m.s deviations | | |

| | |
|---|---|
| Bond lengths (Å) | 0.008 |
| Bond angles (°) | 1.55 |

^{a}Values in parentheses are for highest-resolution shell.
One crystal was used for each data

TABLE 8
Binding and fluorescence of Mango-II and
mutants to TO1-B and its derivatives.

| RNA | Ligand | K_{D} (nM) | FI_{E} |
|---|---|---|---|
| Mango II - WT | TO1-B | 1.1 ± 0.3 | 1303 ± 20 |
| Mango II - A22U | TO1-B | 0.9 ± 0.4 | 1543 ± 24 |
| Mango II - A22C | TO1-B | 0.9 ± 0.2 | 1407 † |
| Mango II - A22G | TO1-B | 6.4 ± 1.5 | 1224 † |
| Mango II - WT | TO3-B | 1.4 ± 0.3 | 61 ± 2 |
| Mango II - A22U | TO3-B | 5.0 ± 2.8 | 46 ± 3 |
| Mango II - A22C | TO3-B | 5.1 ± 1.4 | 37 † |
| Mango II - A22G | TO3-B | 7.6 ± 3.7 | 52 † |
| Mango II - A12U | TO1-B | 0.40 ± 0.07 | 1342 † |
| Mango II - A17U | TO1-B | 1.00 ± 0.16 | 1237 † |
| Mango II - A15U | TO1-B | 1.92 ± 0.39 | 1133 † |
| A20U A25U A26U A31U | | | |
| Mango II - A15U | TO1-B | 0.76 ± 0.24 | 1329 † |
| A20U A25U | | | |
| Mango II - WT | TO1-OAc | 56 ± 2 | 258 ± 10 |
| Mango II - A22U | TO1-OAc | 43 ± 3 | 315 ± 4 |
| Mango II - WT | TO1-ME | 2.41 ± 0.54 | 401 ± 6 |
| Mango II - A22U | TO1-ME | 4.81 ± 1.02 | 302 ± 6 |
| Mango II - WT | TO1-PA | 1.04 ± 0.57 | 493 ± 5 |
| Mango II - A22U | TO1-PA | 2.21 ± 1.09 | 275 ± 3 |
| Mango II - WT | TO1-PE | 0.37 ± 0.06 | 783 ± 13 |
| Mango II - A22U | TO1-PE | 1.00 ± 0.13 | 825 ± 14 |

† Indicates the fluorescence enhancement was calculated relative to wt from the binding titration.

[0361] To understand how the Mango-II A22U mutation results in increased TO1-Biotin fluorescence enhancement, we determined the co-crystal structure of this complex at 2.8 Å resolution (Table 7). The RNA structure is generally unchanged from that of the wild-type. The nucleobase of U22 is ordered but projects into solvent rather than interacting with T3. TO1-Biotin adopts the same orientation in all three chains in the A.U. with Bzt and MQ stacking on G29 and G13, respectively (FIG. 39 E,F). Among our crystal structures, the binding pocket of the mutant is better ordered than that of either wild-type complex as judged by the mean real-space correlation coefficient (Table 10). Ligand-RNA shape complementarity (SC) analysis9 of each co-crystal structure indicates that the A22U binding pocket conforms to TO1-Biotin better than wildtype, with SC statistics of 0.796 (rms=0.004) and 0.750 (rms=0.009), respectively. The SC statistic of Mango-II-T03-Biotin complex, 0.800 (rms=0.019), was similar to that of Mango-II(A22U)-TO1-Biotin.

TABLE 9
RNA sequence table.

| | | | SEQ |
|---|---|---|---|
| | RNA | Sequence | ID |
| # | Name | | NO |
| 1 | Mango | GCGUACGAAG GAGAGGAGAG GAAGAGGAGA | 6902 |
| | II-wt | GUACGC | |
| 2 | Mango | GCGUACGAAGGAGAGGAGAGGUAGAGGAGAGU | 6903 |
| | II- | ACGC | |
| | A22U | | |
| 3 | wt* | GGCACGUACGAAGGAGAGGAGAGGAAGAGGAG | 6904 |
| | (8 bp) | AGUACGUGC | |
| 4 | A22U* | GGCACGUACGAAGGAGAGGAGAGGUAGAGGAG | 6905 |
| | | AGUACGUGC | |
| 5 | A22C* | GGCACGUACGAAGGAGAGGAGAGGCAGAGGAG | 6906 |
| | | AGUACGUGC | |
| 6 | A22G* | GGCACGUACGAAGGAGAGGAGAGGGAGAGGAG | 6907 |
| | | AGUACGUGC | |
| 7 | A12U* | GGCACGUACGAAGGUGAGGAGAGGAAGAGGAG | 6908 |
| | | AGUACGUGC | |
| 8 | A17U* | GGCACGUACGAAGGAGAGGUGAGGAAGAGGAG | 6909 |
| | | AGUACGUGC | |
| 9 | A15U | GGCACGUACGAAGGUGAGGUGAGGUUGAGGU | 6910 |
| | A20U | GAGUACGUGC | |
| | A25U | | |
| | A26U | | |
| | A31U* | | |
| 10 | A15U | GGCACGUACGAAGGUGAGGUGAGGUAGAGGAG | 6911 |
| | A20U | AGUACGUGC | |
| | A25U* | | |

TABLE 10
Mean CO values for binding pocket residues
in respective complexes and chains.

| | Mango-II-TO1 | Mango-II-TO3 | Mango-II-A22U-TO1 |
|---|---|---|---|
| Chain A | 0.9282 | 0.9433 | 0.9605 |
| Chain B | 0.9181 | 0.9201 | 0.9431 |
| Chain C | 0.8606 | 0.8790 | 0.9248 |

[0362] Binding pocket residues are defined as G13, G18, G24, G29, A12, A17, A22, A23 and A28

[0363] To extend our crystallographic observations into solution conditions, we examined the fluorescence lifetimes of the wildtype and A22U mutant Mango-II RNAs in complex with TO1-Biotin. The A22U mutation increases the average lifetime of the emission from 1.51 (±0.06) ns to 1.92 (±0.03) ns. The lifetime of the Mango-III-TO1-Biotin complex has two components, and both are increased in the mutant compared to the wild-type: the first from 0.52 (±0.02) ns to 0.72 (±0.01) ns, and the second from 2.33 (±0.12) ns to 2.904 (±0.001) ns (FIG. 41, Table 11). Our X-ray structures show that the wild-type Mango-II has two different modes of TO1-Biotin binding, while the A22U mutant is more homogeneous (FIG. 39). The longer lifetimes of the mutant are consistent with this, and in particular suggest reduced torsional freedom in the atoms of the methine linker, as has been shown previously for other complexes of thiazole orange with nucleic acids.10

TABLE 11
Parameters from the analysis of fluorescence lifetime data.

| Parameter | TO1-Biotin | Mango II wt | | Mango II A22U | |
|---|---|---|---|---|---|
| τ₁ (ns) | 0.11 | 0.52 | (±0.02) | 0.72 | (±0.01) |
| α₁ (%) | 63 | 45 | (±3) | 45 | (±2) |
| τ₂ (ns) | 0.50 | 2.33 | (±0.12) | 2.904 | (±0.001) |
| α₂ (%) | 25 | 55 | (±3) | 55 | (±2) |
| t₃ (ns) | 2.63 | \ | | \ | |
| α3 (%) | 12 | \ | | \ | |
| τᵢ (ns) * | 1.77 | 2.05 | (±0.09) | 2.53 | (±0.02) |
| τₐ (ns) * | 0.51 | 1.51 | (±0.06) | 1.92 | (±0.03) |

* τᵢ is the intensity-weighted average lifetime, and τ_{α} is the amplitude-weighted average lifetime calculated from the data presented above. The latter is used in the text when discussing and comparing the TCSPC data for the different structures.

[0364] The Inventor's mutant co-crystal structure shows no direct contacts between U22 and TO1-Biotin. To gain further insight into how the U22 mutation improves Mango-II properties, we examined the effect of varying the length of the linker between the thiazole orange and biotin moieties of TO1-Biotin. We determined the affinity and fluorescence enhancement of four compounds: TO1-OAc (TO1-acetate), TO1-ME (TO1-methylester), TO1-PA (TO1-propanylamide), TO1-PE (TO1-pentenoylester) (FIG. 42, Table 8 & 9). Binding affinity and fluorescence enhancement of TO1-OAc is drastically diminished, and nearly identical between the wild-type and A22U mutant. However, the TO1-ME and TO1-PA exhibit greater fluorescence enhancement and binding affinity with the wild-type than with A22U. This suggests that in the absence of an extended linker, the A22 stabilizes the binding pocket, presumably by stacking on G24 as observed in chain B of the Mango-I-T03-Biotin co-crystal structure (FIG. 39 C,D). Further extension of the linker stabilizes the binding pocket by stacking on T3 but becomes sterically hindered by a bulky purine in position 22. The A22U mutation would limit steric clashes while preventing misfolding of the G-quadruplex core. Thus, the improved properties of the Mango-II A22U mutant may arise from improved packing of the linker of the fluorophore with an RNA with a homogeneous or predominant conformation.

[0365] The inventors demonstrate that Mango-II is a versatile platform for fluorescence enhancement of thiazole-orange derived fluorophores, and have shown that variants of this RNA tag, designed with the aid of crystal structures, have improved properties. Analysis of the fluorophore-RNA shape complementarity of each of our structures reveals that fluorescence enhancement correlates directly with the SC statistic. The Mango-II-TO3-Biotin and Mango-II(A22U)-TO1-Biotin complexes both yield similarly high SC statistics, possibly indicating an upper limit to the shape complementarity attainable for this type of complex. The high SC statistic observed for the A22U mutant-TO1-Biotin complex also correlates with improved binding affinity, fluorescence enhancement and fluorescence lifetime. Fluorescence binding studies on TO1-Biotin variants independently suggest that these improvements are due to removal of steric constraints on the ligand by the transversion mutation to a pyrimidine, consistent with our crystallographic analysis. By achieving enhanced fluorescence properties through improved ligand-RNA packing and structural homogeneity, this work demonstrates that even functionally selected fluorogenic RNAs can potentially be improved through detailed structural and mechanistic analysis.

### REFERENCES

[0366] 1. Paige, J. S.; Wu, K. Y.; Jaffrey, S. R., RNA mimics of green fluorescent protein. Science 2011, 333 (6042), 642-646.
[0367] 2. Dolgosheina, E. V.; Jeng, S. C. Y.; Panchapakesan, S. S. S.; Cojocaru, R.; Chen, P. S. K.; Wilson, P. D.; Hawkins, N.; Wiggins, P. A.; Unrau, P. J., RNA Mango aptamer-fluorophore: A bright, high-affinity complex for RNA labeling and tracking. ACS Chem. Biol. 2014, 9 (10), 2412-2420.
[0368] 3. Tan, X. H.; Constantin, T. P.; Sloane, K. L.; Waggoner, A. S.; Bruchez, M. P.; Armitage, B. A., Fluoromodules consisting of a Promiscuous RNA aptamer and red or blue fluorogenic cyanine dyes: selection, characterization, and bioimaging. J. Am. Chem. Soc. 2017, 139 (26), 9001-9009.
[0369] 4. Rodriguez, E. A.; Campbell, R. E.; Lin, J. Y.; Lin, M. Z.; Miyawaki, A.; Palmer, A. E.; Shu, X. K.; Zhang, J.; Tsien, R. Y., The growing and glowing toolbox of fluorescent and photoactive proteins. Trends Biochem. Sci. 2017, 42 (2), 111-129.
[0370] 5. Trachman, R. J.; Demeshkina, N. A.; Lau, M. W. L.; Panchapakesan, S. S. S.; Jeng, S. C. Y.; Unrau, P. J.; Ferre-D'Amare, A. R., Structural basis for high-affinity fluorophore binding and activation by RNA Mango. Nat Chem Biol 2017, 13 (7), 807-813.
[0371] 6. Trachman, R. J.; Truong, L.; Ferre-D'Amare, A. R., Structural principles of fluorescent RNA aptamers. Trends Pharmacol. Sci. 2017, 38 (10), 928-939.
[0372] 7. Autour A et al., Fluorogenic RNA Mango aptamers for imaging small non-coding RNAs in mammalian cells Nat. Comm. 2018 (In Press), DOI: 10.1038/s41467-018-02993-8.
[0373] 8. Phan, A. T.; Kuryavyi, V.; Gaw, H. Y.; Patel, D. J., Small-molecule interaction with a five-guanine-tract G-quadruplex structure from the human MYC promoter. Nat. Chem. Biol. 2005, 1 (3), 167-173.
[0374] 9. Lawrence, M. C.; Colman, P.M. Shape complementarity at protein/protein interfaces. JMB 1993, 234, 946-950.
[0375] 10. Jarikote, D.V.; Krebs, N.; Tannert, S.; Roder, B.; Seitz, O., Exploring base-pair-specific optical properties of the DNA stain thiazole orange. Chem. Eur. J. 2007, 13, 300-310.
[0376] 11. Leontis, N. B.; Westhof, E., Geometric nomenclature and classification of RNA base pairs. RNA 2001, 7 (4), 499-512.

### Example 2—an RNA Aptamer of Unusual Structural Complexity Induces Bright Fluorescence of a Thiazole Orange Derivative

[0377] In order to elucidate the molecular basis for the unusually bright fluorescence of the Mango-III-TO1-Biotin complex, and as a starting point for structure-guided optimization of this tool for live-cell imaging of RNAs, we have now determined its co-crystal structure at 2.35 Å resolution, revealing a compact aptamer RNA of unusual structural complexity. The thiazole orange (TO) headgroup of the fluorophore is constrained between a long-range Watson-Crick base pair and a G-quadruplex to a planar conformation that would maximize its fluorescence, thereby explaining the high quantum yield of Mango-III.

[0378] Results

[0379] Overall Structure of Mango-III Bound to TO1-Biotin

[0380] A 38-nt construct comprising the conserved 28-nt Mango-III core flanked by nucleotides presumed to form a 5-base pair Watson-Crick duplex was co-crystallized with TO1-Biotin. The structure was solved by the single-wavelength anomalous dispersion (SAD) method using data from an iridium derivative (Table 12, Methods).

TABLE 12
Summary of crystallographic statistics

| | Mango-III-TO1 | | Mango-III-A15U-TO1 | | SuperMango-III-TO1 | |
|---|---|---|---|---|---|---|
| Data collection | | | | | | |
| Space group | P2₁2₁2₁ | | H3 | | I4₁22 | |
| Cell dimensions | | | | | | |
| a, b, c (Å) | 63.03, 67.59, 76.67 | | 91.95, 91.95, 161.69 | | 53.27, 53.27, 188.04 | |
| α β, γ (°) | 90, 90, 90 | | 90, 90, 120 | | 90, 90, 90 | |
| Resolution (Å) | 46.10-2.35 | (2.39-2.35)^{a} | 45.97-2.90 | (2.98-2.90)^{a} | 40.59-1.51 | (1.55- [symbol] |
| R_{merge} | 0.06 | (>1) | 0.038 | (0.91) | 0.05 | (>1) |
| <I>/<σ(I)> | 50.6 | (1.2) | 10.3 | (1.0) | 20.9 | (1.5) |
| Completeness [symbol] | 99.9 | (100) | 98.5 | (99.0) | 99.9 | (98.6) |
| Redundancy | 7.2 | (7.1) | 2.3 | (2.2) | 10.2 | (10.6) |
| Refinement | | | | | | |
| Resolution (Å) | 38.3-2.35 | (2.43-2.35) | 45.98-2.90 | (3.03- [symbol] | 40.59-1.55 | (1.61- [symbol] |
| No. reflections | 12717 | (1237) | 11055 | (1224) | 20013 | (1951) |
| R_{work}/R_{free} | 19.28/20.92 | | 19.29/23.07 | | 16.8/19.12 | |
| No. atoms | 1806 | | 3171 | | 996 | |
| RNA | 1632 | | 2283 | | 787 | |
| TO1-Biotin | 107 | | 93 | | 52 | |
| Ions | 9 | | 5 | | 8 | |
| Water | 25 | | 4 | | 143 | |
| β-factors (Å²) | 76.8 | | 79.75 | | 33.90 | |
| RNA | 76.91 | | 80.17 | | 32.07 | |
| TO1-Biotin | 74.29 | | 67.45 | | 34.09 | |
| Ions | 79.7 | | 65.02 | | 33.35 | |
| Water | 79.1 | | 58.93 | | 41.81 | |
| R.m.s deviations | | | | | | |

| | | | |
|---|---|---|---|
| Bond lengths [symbol] | 0.006 | 0.007 | 0.005 |
| Bond angles | 1.265 | 1.541 | 1.06 |

^{a}Values in parentheses are for highest-resolution shell.
One crystal was used for each data set. [symbol]
indicates data missing or illegible when filed

[0381] The crystallographic asymmetric unit (ASU) contains two similar RNA-fluorophore complexes (RMSD=0.15 Å for all non-hydrogen atoms). The two RNAs in the ASU each make three crystal contacts involving duplex stacking (FIG. 44). Analytical ultracentrifugation and dynamic light scattering (FIG. 45) however, indicate that Mango-III is a monomer in solution.

[0382] The structure of Mango-III (FIG. 46 b,c) is organized around a two-tiered G-quadruplex with all-parallel connectivity, except for G18 of the top tier (T2), which is antiparallel. This quadruplex, which coordinates a canonical axial K+ion (MA), stacks on a base triple, which in turn stacks coaxially on an A-form duplex (paired element P1). Two nucleotides from the loop connecting G14 and G18 of T2, and four nucleotides from the loop that follows G20 (the last of the eight guanines of the G-quadruplex) form the three base pairs of a second helix (P2) that is juxtaposed with the G-quadruplex. U17, which is extruded from the middle of P2, forms a trans Watson-Crick pair with A10 from the propeller loop that connects G9 to G13, on the diagonally opposite side of the T2 G-quartet. The benzothiazole (BzT) and methylquinoline (MQ) of the bound TO1-Biotin are sandwiched between the A10*U17 tertiary base pair and T2 of the G-quadruplex. Reflecting the high structural complexity of this aptamer RNA, only two nucleobases (A6, U11) of the 28-nucleotide conserved core of Mango-III do not share at least a hydrogen bond with another nucleobase. In comparison, six of the 22 nucleotides of the Mango-I core are fully unpaired (FIG. 46 c).

[0383] A coaxial duplex-triplex-quadruplex stack Mango-I is comprised of a three-tiered G-quadruplex flexibly connected to its adjacent A-form duplex P1 through a GAA\hat{ }A-tetraloop-like junction (\hat{ }denotes the site of insertion of the quadruplex). The corresponding residues of Mango-III adopt a completely different structure. Instead of folding like the first three nucleotides of a GNRA tetraloop, G1, A2 and A3 of Mango-III continue the duplex structure of P1 by Watson-Crick base-pairing with complementary nucleotides at the 3′ end of the aptamer (FIG. 46 d). A25 of Mango-III (which corresponds in sequence to the last tetraloop residue of Mango-I) forms an expanded base triple with A7 (which is part of the propeller loop between G5 and G8 of the Mango-III quadruplex) and U19 (which connects G18 an G20 of the Mango-III quadruplex) (FIG. 46 b, FIG. 47a). The A7*U19*A25 triple is unusual because only two direct hydrogen bonds connect the three nucleobases, but these each also hydrogen bonds through its Watson-Crick face to a common water molecule (W1) that lies approximately at the center of the triple.

[0384] The expanded A7*U19*A25 triple links the P1 duplex with the quadruplex of Mango-III through three sets of interactions. First, the base triple stacks below the T1 of the quadruplex and above the closing A3*U26 base pair of P1. Second, the 2′-OH of U26 donates a hydrogen bond to the N1 of A7 of the triple, in effect expanding it to a pseudo-tetrad. Third, a hydrated cation (MB, Sr2+ in this crystal structure, but likely Mg2+ under physiological conditions) and a network of ordered water molecules connects the phosphate of A7 to the minor grooves of both, A3 and G4, thereby spanning the duplex-quadruplex junction. Overall, these interactions likely produce a rigid connection between P1 and the G-quadruplex moieties of Mango-III, which is consistent with the identical (within coordinate precision) relative arrangements of the two elements in the two crystallographically independent aptamer RNAs in the A.U.

[0385] A Partially Parallel Non-Canonical Duplex

[0386] The P2 duplex of Mango-III is unique because of the chain direction of its two strands, and because each of its three base pairs is non-canonical. The backbones of the trans Watson-Crick U15•U22 and trans Hoogsteen A16•A23 base pairs are parallel. The third base pair is formed between U24 and G21, whose backbones are locally anti-parallel, being on opposite ends of the same loop connecting G20 of T1 (the last guanine of the G-quadruplex) to A25 of the base triple. The G21•U24 pair is formed in cis, and comprises a single hydrogen bond. The unusual structure of the P2 duplex is reflected in variable C1′-C1′ distances (8.5 Å, 11.4 Å and 12.6 Å for the three pairs) that differ from that typical for canonical antiparallel A-form RNA duplexes (10.7 Å), and appears to be stabilized by a cross-strand stacking of A16 on G21. This latter interaction gives rise to two reciprocal hydrogen bonds between the N1 of A16 and the 2′-OH of G21, and the 06 of G21 and the 2′-OH of A16.

[0387] Formation of a duplex such as P2 between nucleotides in a propleller loop of a G-quadruplex and residues 3′ to it is unusual. P2 contributes to the overall structure of Mango-III and formation of its fluorophore binding pocket in three important ways. First, because P2 is followed immediately by A25, formation of the duplex anchors the 2-tiered G-quadruplex onto the base triple. Second, G18 and G20 form the only non-contiguous and anti-parallel guanine stack in the Mango-III G-quadruplex, and P2 anchors the backbones of these two nucleotides next to each other. This may be further facilitated by a hydrogen bond between the pro-Rp non-bridging phosphate oxygen (NBPO) of U10 and the 2′-OH of G14 from the adjacent guanine stack (FIG. 49 a). Third, P2 helps position U17 of the tertiary base pair in the fluorophore binding pocket of Mango-III, where it plays a functionally essential role.

[0388] The TO1-Biotin-Binding Site of Mango-III

[0389] Unbiased residual electron density corresponding to the BzT and MQ heterocycles as well as the four proximal atoms of the PEG linker of TO1-Biotin unambiguosly located the TO headgroup between T2 of the G-quadruplex and the tertiary A10•U17 trans Watson-Crick base pair (FIG. 49 b) A strong anomalous difference Fourier feature corroborated the location of the sulfur atom of BzT. Unlike in its Mango-I complex, where the planes of BzT and MQ subtended a 45° angle, and the biotin moiety stacked on the G-quadruplex and hemmed in the MQ ring, when bound to Mango-III the BzT and MQ rings are either coplanar (chain B) o modestly angled (23°, chain A), and the biotin projects out into solvent where it is presumed disordered. A further distinction between the Mango-I and Mango-III complexes is that whereas in the former the sulfur of BzT projects outward from the quadruplex, it lies at the center of T2 in the latter, where it is in van der Waals contact with the 06 of G18.

[0390] To test the functional significance of the tertiary A10•U17 base pair of Mango-II, we generated all sixteen combinations of nucleotides at these two positions, and examined their effect on TO1-Biotin binding and fluorescence enhancement (FIG. 52). With one exception, these mutations resulted in a least a 10-fold decrease in binding affinity and more than a 24% loss in fluorescence enhancement. The exception was the A10U point mutant, which not only exhibited TO1-Biotin binding affinity indistinguishable from that of the Mango-III wild-type, but also a 22% higher fluorescence enhancement. Thus, the tertiary base pair of Mango-III is important for fluorescence enhancement, and two of the sixteen possible nucleotide pairs yield bright fluorescence.

[0391] Binding of TO1-Biotin to Mango-III appears to be further stabilized by U12, whose nucleobase is perpendicular to the T2 and A10•U17 planes, and where it hydrogen bonds through its N3 to the N3 of A10 and through its 2′-OH to the pro-Sp NBPO of G14 (FIG. 49 a,b). The nucleobase of this perpendicular U12 is in van der Waals contact with the proximal atoms of the PEG linker of TO1-Biotin. Previous characterization of Mango-III showed that the U12C mutant was 40% less fluorescent. We made the U12A and an abasic residue 12 variants, and found that they exhibited greater than 10-fold loss of affinity and greater than 45% loss in fluorescence enhancement. Thus, U12 appears to provide optimal interactions, both intramolecular and with the bound fluorophore.

[0392] Structure of the Enhanced Mango-III(A10U) Mutant

[0393] To determine the structural basis of the improvement in fluorescence resulting from the A12U mutation of Mango-III, we determined the crystal structure of this variant in complex with TO1-Biotin at 2.9 Å resolution (Table 1, Methods, and FIG. 4c, d). The mutant crystallized with four independent aptamer-fluorophore complexes in the A.U. The overall structures of the four chains are similar, but two of them (chains B and D) have partially disordered P2 helices where the cross-strand-stacked A16 and G21 are ordered, but U15, A23 and U24 are partially disordered. In all four chains, the U10 base resulting from the mutation forms a trans Watson-Crick pair with U17. The C1′-C1′ distance of the U10*U17 base pair of the mutant (11.1 Å) is largely unchanged from that of the A10*U17 pair of the wild-type Mango-III (11.2 Å).

[0394] In both structures, N3 of U17 donates a hydrogen to bond with either N3 of the wild type A15 or O2 of U15. The distance of this hydrogen bond decreases from ˜2.95 Å in the wild type structure to ˜2.7 Å in the A15U mutant. This further reduces the overlap of the nucleotide in position 15 with the methylquinoline. As a result, TO1-Biotin is observed in two distinct conformations in the ASU of the A15U mutant, with two copies found in the E conformation and two copies in the Z conformation (FIG. 48 C). Both TO1-Biotin fluorophores in the wild type structure are in the Z-conformation.

[0395] The mutant base pair results in reduced overlap with the ligand. This is consistent with fluorescence binding data showing that the more extended T03-Biotin fluorophore is disrupted by pyrimidine substitutions in the cap and favored by purine substitutions (FIG. 52). Interestingly, Mango-III and the Mango-III A15U mutant bound to a broad set of TO1 fluorophore derivatives (FIG. 53) in contrast to Mango-I.

[0396] Structure Guided Reselection of Mango-III

[0397] Given the improved fluorescence enhancement observed in the A22U mutant and the detrimental effects of mutagenesis to T1′ and T1, as well as the structurally implied instability of these two regions, we hypothesized that structure guided reselection would improve the fluorescence enhancement and or stability of the Mango-III aptamer. A starting pool of 4.1×106 sequences was generated by mixing two RNA pools in equal proportion, with the first pool (pool 1) randomized at ten positions in the conserved Mango-III core (8, 12, 15, 17, 22, 24, 26, 29, 30, 31) and the second pool (pool 2) randomized at the same positions as pool 1 with an additional random insertion 3′ to position 31 to potentially allow for a canonical G-tetrad to form. An engineering work flow was implemented consisting of one round of SELEX*, to enrich high affinity aptamers, followed by seven rounds of IVC to select for bright aptamers. The selection converged on five sequences with frequencies of 58%, 12%, 8.5%, 1.2% and 0.4% (FIG. 50). Identical to the Mango-III-A15U mutant, all five sequences possessed uridines at binding pocket positions 15, 17, and 22 indicating that the rationally designed A15U mutant is optimal for fluorescence enhancement. However, all five sequences contained the insertion 3′ to position 31 as well as mutations in the helix-T1 junction, T1, and T1′ indicating that the region distal from the binding pocket is indeed suboptimal.

[0398] The inter-tier interactions of A21 and G26 appear to be the most stable in P2. This interaction network is observed in all six protamers of our two structures, whereas two protamers in the ASU of Mango-III-A15U show U20, A28, and U29 in an unfolded state. However, even the unfolded conformations in the Mango-III (A15U)-TO1-Biotin complex resolve the pro-RP oxygen of U20 hydrogen bonding to the O2′ of G19, suggesting that the nucleotide in the 20 position can promote a stable binding-pocket regardless of base composition. Indeed, mutagenesis of the bases in P2 show that T3′ is the most tolerant to nucleotide changes, with TO1-Biotin Kds ranging from 1.6 nM to 9.7 nM. while mutagenesis of P2′ and P1′ exhibit Kds ranging from 140 nM to 250 nM. Seeing as the A21 residue is adjacent to the cap nucleotide U22, the binding of fluorophore may couple folding of both U22 and A21. These binding data support the importance of A21 and G26 in stabilizing the fluorophore binding pocket and the precarious nature of U29, given its location adjacent to the mixed tetrad, T1.

[0399] Methods

[0400] Crystallography

[0401] RNAs were chemically synthesized (Dharmacon); deprotected according the manufacturers protocol and gel purified. RNAs were exchanged into 20 mM MOPS-KOH pH 7.0, 150 mM KCl and 10 μM EDTA through centrifugal ultrafiltration (3,000-Da cutoff, Millipore); filtered (0.1 μm cutoff, Amicon Ultrafree-MC, Millipore); and stored at 4° C. Some RNAs were in vitro transcribed and purified by electrophoresis on 14% polyacrylamide (19:1 acrylamide/bisacrylamide), 1×TBE, 8M Urea gels; electroeluted from gel slices; washed once with 1 M KCl; desalted by ultrafiltration and a partial list appears in FIG. 52.

[0402] Crystallization of Mango-III-TO1-Biotin was performed by heating RNA 1 (20 mM MOPS-KOH pH 7.0, 150 mM KCl, 10 μM EDTA) to 95° C. for 3 minutes, placed at 21° C. for 10 minutes, mixed with equimolar concentration of TO1-Bitoin then kept at 21° C. for 30 minutes. For crystallization, 0.2 p of RNA solution (300 μM) and 0.2 μl reservoir solution were mixed and equilibrated against 0.04 M Na Cacodylate pH 6.5, 0.08 M NaCl, 0.012 M KCl, 0.02 M MgCl₂, 0.012 M Spermine•4 Cl, 5.5% Sucrose, 31% MPD. Strongly fluorescent (500 nm illumination), tretraganol pyramidal crystals grew in 1-3 days to maximum dimensions of 300×100×100 μm³. Additional cryoprotection was not necessary prior to mounting the crystal in a nylon loop and vitrifying by plunging into liquid nitrogen. Data collection was performed under a cryo-cooled nitrogen stream at APS 22-BM with a beam wavelength of 0.977 Å as well as APS 24-ID-C at 1.495 Å resulting in data sets with a maximum resolution of 2.35 Å. Data were reduced in HKL2000 with 10% of reflections flagged for R_{Free} calculation. Phases were obtained by soaking crystals in drop conditions above supplemented with 10 mM Iridium hexamine for 90 minutes and then vitrifying by plunging into liquid nitrogen. Data sets of iridium soaked crystals were collected at APS 22-ID at a wavelength of 0.957 Å. SHELXC reported a significant anomalous signal extending to 3.5 Å from a single crystal diffracting to 3.2 Å. Two heavy atom sites were located by SHELXD with density modification performed in SHELXE resulting in an uninterpretable map. Sites from SHELXD were loaded into AutoSol resulting in phase solution with a figure of merit of 0.22. The resulting density modified map showed decent density contrast for a helical region allowing for 16 bases to be modeled directly into the SAD map. This model was then refined using Pehnix.refine and molecular replaced into the native data set (2.35 Å resolution) collected at APS 22-BM using the program Phaser, resulting in a TFZ score of 12.1. Manuel building and refinement was performed in Coot and Phenix.refine, respectively, using the HL coefficients generated from the Iridium dataset as a target.

[0403] Mango-III-A15U-TO1-Biotin was crystallized by adding 0.2 μl of RNA 2 solution (300 μM, prepared similarly to above with addition of TO1-Biotin) and 0.2 μl reservoir solution were mixed and equilibrated against 1.6 M Ammonium Citrate, 3.0% glycerol and 4% Acetone. Strongly fluorescent, equilateral triangular rod like crystals, grew in 1-2 days with dimensions of 80×(20×20×20) μm. Supplementation of the growth conditions was not necessary for cryoprotection. Crystals were mounted in a nylon loop and vitrifying by plunging into liquid nitrogen. Data were collected at ALS beamline 502 at a wavelength of 1.105 Å. Data were reduced in DIALS with 5% of reflections being flagged for R_{Free} calculation. Phasing was performed by molecular replacement using the program Phaser with coordinates from the Mango-III-TO1 structure from above with residues 1, 2, 15, 22, 37 and 38 deleted along with the TO1 ligand. A replacement solution was found with a TFZ score of 15.2. Multiple rounds of building and refinement were performed in Coot and Phenix.refine respectively. Simluated annealing was performed every 6 refinement cycles at 5000 K until an R_{Free} of 0.25 was reached. A new set of R_{Free} flags composing 10% of reflections was selected and building and refinement continued with 4 rounds of simulated annealing.

[0404] Analytical Ultracentrifugation

[0405] Analytical Ultracentrifugation was performed on RNA 1 in the presence and absence of TO1-Biotin. Cells contained RNA Mango at 5 μM concentration in addition to 20 mM MOPS-KOH, pH 7.0, 150 mM KCl, 10 μM EDTA. Samples were prepared as noted above. 500 scans were collected and averaged on a Beckman XLI analytical ultracentrifuge. Absorbance was measured at 295 nm, under constant velocity with a run speed of 60,000 r.p.m. at 20° C. The viscosity and density of the buffer were calculated to be 0.01015 P and 1.0068 g ml¹, respectively, with the Sednterp server (http://rasnb.orq/sednterp).

### Fluorescence Binding Experiments

[0406] RNA Preparation

[0407] RNAs 3-10 were in vitro transcribed via run off transcription with oligonucleotides purchased from IDT and purified by electrophoresis on 10% polyacrylamide (19:1 acrylamide/bisacrylamide), 1×TBE, 8M Urea gels; electroeluted from gel slices; washed once with 1 M KCl; desalted by ultrafiltration. RNA concentrations were determined by reading the Absorbance at 260 nm on a NanoDrop Spectrophotometer (ThermoFisher Scientific), and using the extinction coefficients determined with the nearest neighbor method using the IDT OligoAnalyzer online tool.

[0408] Binding Affinity Measurements

[0409] Fluorescence readings were recorded using a Varian Cary Eclipse Spectrophotometer set to measure at the maximum excitation and emission wavelengths of the Mango II aptamer dye complex. Fluorescence titrations were performed in Mango selection buffer (WB: 140 mM KCl, 1 mM MgCl₂, 10 mM NaH₂PO₄ pH 7.2, 0.05% Tween-20). To determine binding affinity and Fmax, curves were fitted using least squares (Kaleidagraph 4.5) using the following equation for TO1-Biotin:

$$F = {F}_{0} + \frac{{F}_{max}}{2} ( {K}_{D} + [ RNA ] + [ TO ] - \sqrt{{( [ RNA ] - [ TO ] )}^{2} + {K}_{D} ( {K}_{D} + 2 [ RNA ] + 2 [ TO ] )} )$$

[0410] Or to the following equation for TO3-Biotin:

$$F = {F}_{0} + \frac{{F}_{max} [ RNA ]}{{K}_{D} + [ RNA ]}$$

[0411] Fluorescence Enhancement Measurements

[0412] Fluorescence enhancement experiments were performed on a Photon Technologies International/820 Photomultiplier Detection System with an excitation and emission wavelength centered at 510 nm and 535 nm, respectively, for TO1-Biotin and TO1 derivatives while TO3-Biotin excitation and emission were 635 nm and 660 nm, respectively. The bandwidth for all measurements was 1.5 nm for all experiments. Measurements were performed in a 0.2 cm path length cuvette in a background of 20 mM MOPS pH 7.0, 150 mM KCl, 10 μM EDTA. Fluorescence readings were taken in the absence of RNA at a ligand concentration of 0.82 μM. A concentrated, annealed stock of RNA was then added to the cuvette resulting in a final concentration of 2 μM RNA and allowed to equilibrate for 1 minute prior to taking an emission reading. Fluorescence enhancement was determined by dividing the fluorescence signal of ligand in the presence of RNA by the fluorescence signal in the absence of RNA corrected for the background of the instrument.

[0413] Fluorescence Lifetime Measurements

[0414] Fluorophore lifetime measurements were performed by using an in-house modified 2-photon fluorescence microscope based on a Zeiss LSM 510 unit capable of Time-Correlated Single-Photon Counting (TCSPC) measurements. A diode-pumped solid state laser (Millenia Prime, Spectra Physics, Newport, Calif.) was used to pump a Ti:Sapphire Tsunami oscillator (Model 3960C, Spectra Physics, Newport, Calif.), operating in femtosecond mode, at a repetition rate of 80 MHz, and tunable in the near infrared region. The output beam of the Ti:Sapphire laser was directed into an acousto-opto modulator (MT110/B50/A1.5 IR/S, AA Optoelectronic, France), controlled through the Zeiss LSM electronics and software, to attenuate the power before steering it into the LSM unit. The beam was reflected onto a 700/488 dichroic mirror and directed into the back aperture of a Plan Apochromat 63x, NA 1.4, oil immersion objective, and expanded to fill the back pupil. The fluorescence from the sample was collected from the same objective, intercepted by a 733LP dichroic mirror, sent toward the back port of the microscope, filtered through an ET700SP-2P filter (Chroma Technologies, Bellows Falls, Vt.) to remove residual scattering from the laser, and further passed through a 540/50 nm bandpass filter (Semrock, Rochester, N.Y.). The fluorescence is finally focused onto the photocathode of a H7422P-40 GaAsP photomultiplier detector (Hamamatsu, Japan). The large NA of the objective contributes to a certain degree of depolarization of the incoming excitation beam, as well as of the detected fluorescence. According to Fisz (J. Chem. Phys. A, 2007 and 2009), this would allow one to omit an analyzer (polarizer) in front of our detector, because magic angle conditions are achieved by using a 45° angle detection (i.e. unpolarized) configuration. The signal from the detector and the synchronization signal from the laser are directed into an SPC150 photon counting card (Becker&Hickl, Germany), controlled by the SPCM64 proprietary software from the manufacturer (Becker&Hickl, Germany). The data were collected with a 12.5 ns time window in TCSPC histogramming mode with 1024 channels, with a width of 12.2 ps each.

[0415] For the experiments the laser was tuned at 780 nm, and the power adjusted to 18 mW before the objective lens. RNA samples were diluted to a concentration of ˜3-5 μM in buffer. TO-1B was measured at a concentration of 50 μM due to low fluorescence signal of the compound, compared to the RNA-bound version. An 80 μl droplet was deposited onto a #1.5 coverslip, previously treated with BSA to avoid nonspecific binding of RNA to the glass, and covered to avoid evaporation. The excitation was focused ˜5 μm above the upper surface of the coverslip to reduce scatter and to avoid collecting signal from molecules immobilized on the glass surface. The beam was kept stationary by using the LSM controller to simply open the excitation shutter, and data were collected until the maximum count in the peak channel of the TCSPC histogram reached 10⁴ photons. Experiments were repeated in triplicate. An instrument response function (IRF) was collected on every day of measurement by recording the second harmonic generation (SHG) signal from crushed urea crystals deposited onto a glass coverslip, in this case the bandpass filter before the detector was substituted with a 440 nm short pass filter to collect the 390 nm SHG. The data collected with the SPCM64 software were stored as *.sdt files for subsequent analysis.

[0416] Fluorescence Lifetime Data Analysis

[0417] Data were analyzed using the SPClmage software (Becker&Hickl, Germany). The fluorescence decay curves were fit using exponential functions of the form:

$$I ( t ) = {\sum }_{i = 1}^{n} {a}_{i} {e}^{- t / {τ}_{i}}$$

[0418] Where n is at most equal to 3 in our software. The data fitting routine uses a least-square algorithm where the exponential function is first reconvoluted with the measured IRF and then fit to the data. The shift of the IRF for each dataset, as well as a scatter contribution were included as free parameters during fitting. The number of exponentials used to fit the data was adapted in order to minimize the χ² value, which together with the randomness of the residuals was used to evaluate the goodness of the fit.

### REFERENCES

[0419] 1. Otwinski, Z. & Minor, W. Processing of X-ray diffraction data collected in oscillation mode. Methods Enzymol. 276, 307-326
[0420] 2. Kabsch, W. XDS. Acta Cryst. D Biol Crystallogr 66, 125-132 (2010)
[0421] 3. McCoy, A. J. et al. Phaser crystallographic software. J. Appl. Cryst. 40, 658-674 (2007)
[0422] 4. Emsley, P., Lohkamp, B., Scott, W.G. & Cowtan, K. Features and development of Coot. Acta Crystallogr. D Biol. Crystallogr. 66, 486-501
[0423] 5. Adams, P. D. et al. PHENIX: a comprehensive Python-based system for macromolecular structure solution. Acta Crystallogr. D Biol Crystallogr. 66, 213-221 (2010)

1. A RNA aptamer comprising an active core sequence as set forth in:
(SEQ ID NO: 2)
5′- GG@(T₁/WGW)GG(#₁H/WG)WGGN@(#₂/-)G(T₂/H)GNH
(AN@T₃/G)-3′
with the proviso that the active core sequence is not the sequence as set forth in SEQ ID NO: 1: GAAGGGAC GGUGC GGAGAGGAGA
wherein, within the active core sequence:
represents no nucleotide (gap);
K represents U or G;
S represents C or G;
R represents A or G;
W represents A or U;
H represents A, C or U;
N represents A, C, G or U; and
@ represents N or a deletion;
and wherein T₁ represents any nucleotide, T₂ and T₃ being defined as follows:
when T₁ is A, T₂ can be either A, G or U; and
when T₁ is A and T₂ is A, then T₃ is U;
when T₁ is A and T₂ is G, then T₃ is U; and
when T₁ is A and T₂ is U, then T₃ is A or U; or
when T₁ is C, T₂ can be either G or U; and
when T₁ is C and T₂ is G, then T₃ is C or G; and
when T₁ is C and T₂ is U, then T₃ is G; or
when T₁ is G, T₂ can be either G or C, and T₃ is C; or
when T₁ is U, T₂ can be either A or C; and
when T₁ is U and T₂ is A, then T₃ is A or U; and
when T₁ is U and T₂ is C, then T₃ is A;
wherein #₁ and #₂ represents any nucleotide pair such that
when #₁ is A, then #₂ represents A, C, G or U; or
when #₁ is C, then #₂ is C; or
when #₁ is G, then #₂ is G; or
when #₁ is U, then #₂ represents A, G or U-;
wherein the aptamer adopts a determined tridimensional conformation which is a fluorophore binding conformation, said aptamer when it adopts the fluorophore binding conformation being liable interact with a fluorophore;
wherein the aptamer further comprises, contiguous with the active core sequence, a 5′ leader sequence attached, or operably linked to (by covalent bound, i.e. phosphodiester bound), to the 5′ terminus of the active core and a 3′ tail sequence attached, or operably linked to (by covalent bridge mentioned below), to the 3′ terminus of the active core, and wherein the 5′ leader sequence and the 3′ tail sequence together mediate the juxtaposition of the 5′ terminus of the active core and the 3′ terminus of the active core when the aptamer is the fluorophore binding conformation.

2. The aptamer according to claim 1, wherein said aptamer can interact with a fluorophore, said fluorophore being selected from group consisting of the following compounds of the following Formula I and Formula II: [chemical structure]
wherein:
X represents O, S, Se, or C(CH₃)ₙ;
R₁ represents an alkyl having from 1-6 carbons;
R₂ represents an alkyl having from 1-6 carbons;
R₃ is either a fused benzene, an alkyl having 1-6 carbons, a methoxy or H;
R₄ is an alkyl having 1-6 carbons, a methoxy or H; and
n=zero or an integer from 1-6; [chemical structure]
wherein:
R₁ represents any substituent;
R₂ through R₅ represent H, F, Cl, Br, I, CH₃, linear polymers, or extended heterocycles
R₆-R₉ represent H, F, Cl, Br, I, CH₃, linear polymers, or extended heterocycles
R₁₀ represents H, F, Cl, Br, I, CH₃, linear polymers, or extended heterocycles.
R₁₁ through R₁₂ represent H, F, Cl, Br, I, CH₃, linear polymers, or extended heterocycles
X represents the following atoms O, S and Se; and
n is 1 or 3 or 5.

3. The aptamer according to claim 1, wherein the core active sequence comprises the following sequence:
(SEQ ID NO: 5)
5′-$₁GGNT₁GG#₁HUGGHA#₂GT₂GNHAN@T₃$₂-3′
wherein:
H represents A, C or U
N represents A, C, G or U
@ represents any nucleotide or no nucleotide
#₁ and #₂ represents any nucleotide pair such that
when #₁ is A, then #₂ represents A, C, G or U; or
when #₁ is C, then #₂ is C; or
When #₁ is G, then #₂ is G; or
when #₁ is U, then #₂ represents A, G or U.
$1 and $2 represent any pair of nucleotides such that
when $₁ is A, then $2 is A, G or U; or
when $1 is C, then $2 is A, G or U; or
when $1 is G, then $2 is A, C, G or U; or
when $1 is U, then $2 is A, G.

4. The RNA aptamer according to claim 1, wherein the core active sequence comprises the following sequence:
(SEQ ID NO: 6)
GG@WGWGGWGWGGN@GHGGHG
wherein:
W represents A or U;
H represents A, C or U;
N represents A, C, G or U; and
@ represents N or a no nucleotide.

5. The RNA aptamer according to claim 1, wherein the core active sequence comprises the following sequence:
(SEQ ID NO: 7)
GAA(GG)₁AA(GG)₂NUU(GG)₃UAN′G₄ᵢUG₄ᵢᵢGUAUAUUC
wherein:
N is any nucleotide, N′ the anti-watson crick partner to N
wherein (GG)₁, (GG)₂, (GG)₃ and G₄ᵢ and G₄ᵢᵢ form a quadruplex structure when the active core is in the fluorophore binding conformation, with the 5′ terminus of the active core being juxtaposed to the 3′ terminus of the active core.

6. The RNA aptamer according to claim 1, wherein the core active sequence comprises the following sequence:
(SEQ ID NO: 8)
[G/C]NR(GG)₁[R/D]AG[A/U](GG)₂NGN(GG)₃A*[A/U/D]GA*
(GG)₄[A/C]R[A/D]
wherein:
A* is A or N,
N is any nucleotide
R is a purine,
D denotes the absence of nucleotide,
wherein (GG)₁, (GG)₂, (GG)₃ and (GG)₄ form a quadruplex structure when the active core is in the fluorophore binding conformation, with the 5′ terminus of the active core being juxtaposed to the 3′ terminus of the active core.

7. The RNA aptamer according to claim 1, wherein the core active sequences comprises one of the sequences as set forth in SEQ ID NO: 7 to SEQ ID NO: 6887.

8. The RNA aptamer comprising a core active sequence as defined in claim 1, with the proviso that said aptamer active core does not have the core sequence: GNR(GG)₁GNN(GG)₂NGN(GG)₃AGN(GG)₄AGA SEQ ID NO: 6888, wherein R is a purine, and N is any nucleotide.

9. The RNA aptamer according to claim 1, wherein the 5′ leader sequence and the 3′ tail sequence are complementary, so that binding of the 5′ leader sequence to the 3′ tail sequence mediates the juxtaposition of the 5′ terminus of the active core and the 3′ terminus of the active core when the aptamer is the fluorophore binding conformation.

10. The RNA aptamer according to claim 1, wherein the 5′ leader sequence and the 3′ tail sequence are complementary to a target sequence, the target sequence comprising:
a leader bait sequence that is complementary to the 3′ tail sequence of the aptamer; and,
a tail bait sequence that is complementary to the 5′ leader sequence of the aptamer;
the leader and tail bait sequences being juxtaposed in the target sequence, so that binding of:
the 5′ leader sequence to the tail bait sequence; combined with,
binding of the 3′ tail sequence to the leader bait sequence;
mediates the juxtaposition of the 5′ terminus of the active core and the 3′ terminus of the active core when the aptamer is the fluorophore binding conformation.

11. The RNA aptamer according to claim 1, wherein the leader and tail bait sequences being contiguous in the target sequence.

12. The RNA aptamer according to claim 1, wherein juxtaposition of the 5′ terminus of the active core and the 3′ terminus of the active core when the aptamer is the fluorophore binding conformation brings a phosphate group from the 5′ terminus to within 10 Å, or to within 9 Å or to within 8 Å, of a phosphate group from the 3′ terminus.

13. The RNA aptamer according to claim 1, wherein the aptamer has a fluorophore binding affinity of at least 400 nM, 300 nM, 200 nM, 100 nM, 50 nM, 40 nM, 30 nM, 20 nM, 10 nM, 5 nM, 1 nM or 0.5 nM when the core is in a fluorophore binding conformation.

14. The RNA aptamer according to claim 1, wherein the fluorophore-aptamer complex has a brightness of at least 7,000 M⁻¹cm⁻¹, 8,000 M⁻¹ cm⁻¹, 9,000 M¹cm⁻¹, 10,000 M⁻¹cm⁻¹, 43,000 M⁻¹cm¹.

15. The RNA aptamer according to claim 1, wherein the fluorophore-aptamer complex has a fluorescent lifetime of at least 1 ns, or at least 2 ns, or at least 3 ns, or at least 4 ns or at least 5 ns, or at least 6 ns, or in the range of 1-6 ns.

16. The RNA aptamer according to claim 1, wherein the fluorophore-aptamer complex is fluorescent in a formaldehyde solution.

17. The RNA aptamer according to claim 1, wherein the secondary aptamer sequence has affinity for a secondary target moiety

The application's sequence listing, which the Patent Office published only in electronic form, follows.

SEQUENCE LISTING (6911 sequences)

SEQ ID NO: 1 - RNA, 23 nt, Artificial Sequence
  Mango I aptamer
gaagggacggugcggagaggaga

SEQ ID NO: 2 - RNA, 19 nt, Artificial Sequence
  general consensus
  misc_feature (3)..(3): represents N or no nucleotide
  misc_feature (4)..(4): represents T1 or WGW
  misc_feature (7)..(7): represents #1H or WG
  misc_feature (11)..(11): n is a, c, g, or u
  misc_feature (12)..(12): represents N or no nucleotide
  misc_feature (13)..(13): represents #2 or no nucleotide
  misc_feature (15)..(15): represents  T2 or H
  misc_feature (17)..(17): n is a, c, g, or u
  misc_feature (19)..(19): represents AN@T3 or G wherein @ represents N or no nucleotide
ggnnggnwggnnngngnhn

SEQ ID NO: 3 - RNA, 19 nt, Artificial Sequence
  generic consensus
  misc_feature: definitions according to SEQ ID NO : 2
  misc_feature (3)..(4): n is a, c, g, or u
  misc_feature (7)..(7): n is a, c, g, or u
  misc_feature (11)..(13): n is a, c, g, or u
  misc_feature (15)..(15): n is a, c, g, or u
  misc_feature (17)..(17): n is a, c, g, or u
  misc_feature (19)..(19): n is a, c, g, or u
ggnnggnwggnnngngnhn

SEQ ID NO: 4 - RNA, 21 nt, Artificial Sequence
  generic consensus
  misc_feature (1)..(19): definitions according to SEQ ID NO : 2
ggnwgwggwgwggnnghgnhg

SEQ ID NO: 5 - RNA, 25 nt, Artificial Sequence
  generic consensus
  misc_feature (1)..(1): represent any pair of nucleotides such that, whereinif n is A, then position 25 represents A,G or U; wherein n if is C, then position 25 represents A,G or U; wherein if n is G, then position 25 represents A,G or U; and whereinif  n is U, then position 19
  misc_feature (1)..(1): as defined in SEQ ID NO : 2
  misc_feature (4)..(5): n is a, c, g, or u
  misc_feature (8)..(8): n is a, c, g, or u
  misc_feature (15)..(15): n is a, c, g, or u
  misc_feature (17)..(17): n is a, c, g, or u
  misc_feature (19)..(19): n is a, c, g, or u
  misc_feature (22)..(24): n is a, c, g, or u
  misc_feature (25)..(25): represent any pair of nucleotides such that, whereinif n is A, then position 25 represents A,G or U; wherein n if is C, then position 25 represents A,G or U; wherein if n is G, then position 25 represents A,G or U; and whereinif  n is U, then position 19
nggnnggnhugghangngnhannnn

SEQ ID NO: 6 - RNA, 21 nt, Artificial Sequence
  generic consensus
  misc_feature (3)..(3): represents N or no nucleotide
  misc_feature (14)..(14): n is a, c, g, or u
  misc_feature (15)..(15): represents N or no nucleotide
ggnwgwggwgwggnnghgghg

SEQ ID NO: 7 - RNA, 28 nt, Artificial Sequence
  generic consensus
  misc_feature (10)..(10): n is a, c, g, or u
  misc_feature (17)..(17): represents the anti-watson crick partner to position 10
gaaggaaggnuugguangugguauauuc

SEQ ID NO: 8 - RNA, 25 nt, Artificial Sequence
  generic consensus
  misc_feature (1)..(1): represnts G or C
  misc_feature (2)..(2): n is a, c, g, or u
  misc_feature (6)..(6): represnts R or D
  misc_feature (9)..(9): represnts A or U
  misc_feature (12)..(12): n is a, c, g, or u
  misc_feature (14)..(14): n is a, c, g, or u
  misc_feature (17)..(17): represnts A or N
  misc_feature (18)..(18): represnts A or U or D
  misc_feature (20)..(20): represnts A or N
  misc_feature (23)..(23): represnts A or C
  misc_feature (25)..(25): represnts A or D
nnrggnagnggngnggnngnggnrn

SEQ ID NO: 9 - RNA, 23 nt, Artificial sequence
  specific aptamers
ggaaggaauggaaugugguaaaa

SEQ ID NO: 10 - RNA, 23 nt, Artificial sequence
  specific aptamers
ggaaggaauggaaugugguaaca

SEQ ID NO: 11 - RNA, 23 nt, Artificial sequence
  specific aptamers
ggaaggaauggaaugugguaaga

SEQ ID NO: 12 - RNA, 23 nt, Artificial sequence
  specific aptamers
ggaaggaauggaaugugguaaua

SEQ ID NO: 13 - RNA, 22 nt, Artificial sequence
  specific aptamers
ggaaggaauggaaugugguaaa

SEQ ID NO: 14 - RNA, 23 nt, Artificial sequence
  specific aptamers
ggaaggaauggaaugugguacaa

SEQ ID NO: 15 - RNA, 23 nt, Artificial sequence
  specific aptamers
ggaaggaauggaaugugguacca

SEQ ID NO: 16 - RNA, 23 nt, Artificial sequence
  specific aptamers
ggaaggaauggaaugugguacga

SEQ ID NO: 17 - RNA, 23 nt, Artificial sequence
  specific aptamers
ggaaggaauggaaugugguacua

SEQ ID NO: 18 - RNA, 22 nt, Artificial sequence
  specific aptamers
ggaaggaauggaaugugguaca

SEQ ID NO: 19 - RNA, 23 nt, Artificial sequence
  specific aptamers
ggaaggaauggaaugugguagaa

SEQ ID NO: 20 - RNA, 23 nt, Artificial sequence
  specific aptamers
ggaaggaauggaaugugguagca

SEQ ID NO: 21 - RNA, 23 nt, Artificial sequence
  specific aptamers
ggaaggaauggaaugugguagga

SEQ ID NO: 22 - RNA, 23 nt, Artificial sequence
  specific aptamers
ggaaggaauggaaugugguagua

SEQ ID NO: 23 - RNA, 22 nt, Artificial sequence
  specific aptamers
ggaaggaauggaaugugguaga

SEQ ID NO: 24 - RNA, 23 nt, Artificial sequence
  specific aptamers
ggaaggaauggaaugugguauaa

SEQ ID NO: 25 - RNA, 23 nt, Artificial sequence
  specific aptamers
ggaaggaauggaaugugguauca

SEQ ID NO: 26 - RNA, 23 nt, Artificial sequence
  specific aptamers
ggaaggaauggaaugugguauga

SEQ ID NO: 27 - RNA, 23 nt, Artificial sequence
  specific aptamers
ggaaggaauggaaugugguauua

SEQ ID NO: 28 - RNA, 22 nt, Artificial sequence
  specific aptamers
ggaaggaauggaaugugguaua

SEQ ID NO: 29 - RNA, 23 nt, Artificial sequence
  specific aptamers
ggaaggaauggcaugugguaaaa

SEQ ID NO: 30 - RNA, 23 nt, Artificial sequence
  specific aptamers
ggaaggaauggcaugugguaaca

SEQ ID NO: 31 - RNA, 23 nt, Artificial sequence
  specific aptamers
ggaaggaauggcaugugguaaga

SEQ ID NO: 32 - RNA, 23 nt, Artificial sequence
  specific aptamers
ggaaggaauggcaugugguaaua

SEQ ID NO: 33 - RNA, 22 nt, Artificial sequence
  specific aptamers
ggaaggaauggcaugugguaaa

SEQ ID NO: 34 - RNA, 23 nt, Artificial sequence
  specific aptamers
ggaaggaauggcaugugguacaa

SEQ ID NO: 35 - RNA, 23 nt, Artificial sequence
  specific aptamers
ggaaggaauggcaugugguacca

SEQ ID NO: 36 - RNA, 23 nt, Artificial sequence
  specific aptamers
ggaaggaauggcaugugguacga

SEQ ID NO: 37 - RNA, 23 nt, Artificial sequence
  specific aptamers
ggaaggaauggcaugugguacua

SEQ ID NO: 38 - RNA, 22 nt, Artificial sequence
  specific aptamers
ggaaggaauggcaugugguaca

SEQ ID NO: 39 - RNA, 23 nt, Artificial sequence
  specific aptamers
ggaaggaauggcaugugguagaa

SEQ ID NO: 40 - RNA, 23 nt, Artificial sequence
  specific aptamers
ggaaggaauggcaugugguagca

SEQ ID NO: 41 - RNA, 23 nt, Artificial sequence
  specific aptamers
ggaaggaauggcaugugguagga

SEQ ID NO: 42 - RNA, 23 nt, Artificial sequence
  specific aptamers
ggaaggaauggcaugugguagua

SEQ ID NO: 43 - RNA, 22 nt, Artificial sequence
  specific aptamers
ggaaggaauggcaugugguaga

SEQ ID NO: 44 - RNA, 23 nt, Artificial sequence
  specific aptamers
ggaaggaauggcaugugguauaa

SEQ ID NO: 45 - RNA, 23 nt, Artificial sequence
  specific aptamers
ggaaggaauggcaugugguauca

SEQ ID NO: 46 - RNA, 23 nt, Artificial sequence
  specific aptamers
ggaaggaauggcaugugguauga

SEQ ID NO: 47 - RNA, 23 nt, Artificial sequence
  specific aptamers
ggaaggaauggcaugugguauua

SEQ ID NO: 48 - RNA, 22 nt, Artificial sequence
  specific aptamers
ggaaggaauggcaugugguaua

SEQ ID NO: 49 - RNA, 23 nt, Artificial sequence
  specific aptamers
ggaaggaaugguaugugguaaaa

SEQ ID NO: 50 - RNA, 23 nt, Artificial sequence
  specific aptamers
ggaaggaaugguaugugguaaca

SEQ ID NO: 51 - RNA, 23 nt, Artificial sequence
  specific aptamers
ggaaggaaugguaugugguaaga

SEQ ID NO: 52 - RNA, 23 nt, Artificial sequence
  specific aptamers
ggaaggaaugguaugugguaaua

SEQ ID NO: 53 - RNA, 22 nt, Artificial sequence
  specific aptamers
ggaaggaaugguaugugguaaa

SEQ ID NO: 54 - RNA, 23 nt, Artificial sequence
  specific aptamers
ggaaggaaugguaugugguacaa

SEQ ID NO: 55 - RNA, 23 nt, Artificial sequence
  specific aptamers
ggaaggaaugguaugugguacca

SEQ ID NO: 56 - RNA, 23 nt, Artificial sequence
  specific aptamers
ggaaggaaugguaugugguacga

SEQ ID NO: 57 - RNA, 23 nt, Artificial sequence
  specific aptamers
ggaaggaaugguaugugguacua

SEQ ID NO: 58 - RNA, 22 nt, Artificial sequence
  specific aptamers
ggaaggaaugguaugugguaca

SEQ ID NO: 59 - RNA, 23 nt, Artificial sequence
  specific aptamers
ggaaggaaugguaugugguagaa

SEQ ID NO: 60 - RNA, 23 nt, Artificial sequence
  specific aptamers
ggaaggaaugguaugugguagca

SEQ ID NO: 61 - RNA, 23 nt, Artificial sequence
  specific aptamers
ggaaggaaugguaugugguagga

SEQ ID NO: 62 - RNA, 23 nt, Artificial sequence
  specific aptamers
ggaaggaaugguaugugguagua

SEQ ID NO: 63 - RNA, 22 nt, Artificial sequence
  specific aptamers
ggaaggaaugguaugugguaga

SEQ ID NO: 64 - RNA, 23 nt, Artificial sequence
  specific aptamers
ggaaggaaugguaugugguauaa

SEQ ID NO: 65 - RNA, 23 nt, Artificial sequence
  specific aptamers
ggaaggaaugguaugugguauca

SEQ ID NO: 66 - RNA, 23 nt, Artificial sequence
  specific aptamers
ggaaggaaugguaugugguauga

SEQ ID NO: 67 - RNA, 23 nt, Artificial sequence
  specific aptamers
ggaaggaaugguaugugguauua

SEQ ID NO: 68 - RNA, 22 nt, Artificial sequence
  specific aptamers
ggaaggaaugguaugugguaua

SEQ ID NO: 69 - RNA, 23 nt, Artificial sequence
  specific aptamers
ggaaggauuggaaugugguaaaa

SEQ ID NO: 70 - RNA, 23 nt, Artificial sequence
  specific aptamers
ggaaggauuggaaugugguaaca

SEQ ID NO: 71 - RNA, 23 nt, Artificial sequence
  specific aptamers
ggaaggauuggaaugugguaaga

SEQ ID NO: 72 - RNA, 23 nt, Artificial sequence
  specific aptamers
ggaaggauuggaaugugguaaua

SEQ ID NO: 73 - RNA, 22 nt, Artificial sequence
  specific aptamers
ggaaggauuggaaugugguaaa

SEQ ID NO: 74 - RNA, 23 nt, Artificial sequence
  specific aptamers
ggaaggauuggaaugugguacaa

SEQ ID NO: 75 - RNA, 23 nt, Artificial sequence
  specific aptamers
ggaaggauuggaaugugguacca

SEQ ID NO: 76 - RNA, 23 nt, Artificial sequence
  specific aptamers
ggaaggauuggaaugugguacga

SEQ ID NO: 77 - RNA, 23 nt, Artificial sequence
  specific aptamers
ggaaggauuggaaugugguacua

SEQ ID NO: 78 - RNA, 22 nt, Artificial sequence
  specific aptamers
ggaaggauuggaaugugguaca

SEQ ID NO: 79 - RNA, 23 nt, Artificial sequence
  specific aptamers
ggaaggauuggaaugugguagaa

SEQ ID NO: 80 - RNA, 23 nt, Artificial sequence
  specific aptamers
ggaaggauuggaaugugguagca

SEQ ID NO: 81 - RNA, 23 nt, Artificial sequence
  specific aptamers
ggaaggauuggaaugugguagga

SEQ ID NO: 82 - RNA, 23 nt, Artificial sequence
  specific aptamers
ggaaggauuggaaugugguagua

SEQ ID NO: 83 - RNA, 22 nt, Artificial sequence
  specific aptamers
ggaaggauuggaaugugguaga

SEQ ID NO: 84 - RNA, 23 nt, Artificial sequence
  specific aptamers
ggaaggauuggaaugugguauaa

SEQ ID NO: 85 - RNA, 23 nt, Artificial sequence
  specific aptamers
ggaaggauuggaaugugguauca

SEQ ID NO: 86 - RNA, 23 nt, Artificial sequence
  specific aptamers
ggaaggauuggaaugugguauga

SEQ ID NO: 87 - RNA, 23 nt, Artificial sequence
  specific aptamers
ggaaggauuggaaugugguauua

SEQ ID NO: 88 - RNA, 22 nt, Artificial sequence
  specific aptamers
ggaaggauuggaaugugguaua

SEQ ID NO: 89 - RNA, 23 nt, Artificial sequence
  specific aptamers
ggaaggauuggcaugugguaaaa

SEQ ID NO: 90 - RNA, 23 nt, Artificial sequence
  specific aptamers
ggaaggauuggcaugugguaaca

SEQ ID NO: 91 - RNA, 23 nt, Artificial sequence
  specific aptamers
ggaaggauuggcaugugguaaga

SEQ ID NO: 92 - RNA, 23 nt, Artificial sequence
  specific aptamers
ggaaggauuggcaugugguaaua

SEQ ID NO: 93 - RNA, 22 nt, Artificial sequence
  specific aptamers
ggaaggauuggcaugugguaaa

SEQ ID NO: 94 - RNA, 23 nt, Artificial sequence
  specific aptamers
ggaaggauuggcaugugguacaa

SEQ ID NO: 95 - RNA, 23 nt, Artificial sequence
  specific aptamers
ggaaggauuggcaugugguacca

SEQ ID NO: 96 - RNA, 23 nt, Artificial sequence
  specific aptamers
ggaaggauuggcaugugguacga

SEQ ID NO: 97 - RNA, 23 nt, Artificial sequence
  specific aptamers
ggaaggauuggcaugugguacua

SEQ ID NO: 98 - RNA, 22 nt, Artificial sequence
  specific aptamers
ggaaggauuggcaugugguaca

SEQ ID NO: 99 - RNA, 23 nt, Artificial sequence
  specific aptamers
ggaaggauuggcaugugguagaa

SEQ ID NO: 100 - RNA, 23 nt, Artificial sequence
  specific aptamers
ggaaggauuggcaugugguagca

SEQ ID NO: 101 - RNA, 23 nt, Artificial sequence
  specific aptamers
ggaaggauuggcaugugguagga

SEQ ID NO: 102 - RNA, 23 nt, Artificial sequence
  specific aptamers
ggaaggauuggcaugugguagua

SEQ ID NO: 103 - RNA, 22 nt, Artificial sequence
  specific aptamers
ggaaggauuggcaugugguaga

SEQ ID NO: 104 - RNA, 23 nt, Artificial sequence
  specific aptamers
ggaaggauuggcaugugguauaa

SEQ ID NO: 105 - RNA, 23 nt, Artificial sequence
  specific aptamers
ggaaggauuggcaugugguauca

SEQ ID NO: 106 - RNA, 23 nt, Artificial sequence
  specific aptamers
ggaaggauuggcaugugguauga

SEQ ID NO: 107 - RNA, 23 nt, Artificial sequence
  specific aptamers
ggaaggauuggcaugugguauua

SEQ ID NO: 108 - RNA, 22 nt, Artificial sequence
  specific aptamers
ggaaggauuggcaugugguaua

SEQ ID NO: 109 - RNA, 23 nt, Artificial sequence
  specific aptamers
ggaaggauugguaugugguaaaa

SEQ ID NO: 110 - RNA, 23 nt, Artificial sequence
  specific aptamers
ggaaggauugguaugugguaaca

SEQ ID NO: 111 - RNA, 23 nt, Artificial sequence
  specific aptamers
ggaaggauugguaugugguaaga

SEQ ID NO: 112 - RNA, 23 nt, Artificial sequence
  specific aptamers
ggaaggauugguaugugguaaua

SEQ ID NO: 113 - RNA, 22 nt, Artificial sequence
  specific aptamers
ggaaggauugguaugugguaaa

SEQ ID NO: 114 - RNA, 23 nt, Artificial sequence
  specific aptamers
ggaaggauugguaugugguacaa

SEQ ID NO: 115 - RNA, 23 nt, Artificial sequence
  specific aptamers
ggaaggauugguaugugguacca

SEQ ID NO: 116 - RNA, 23 nt, Artificial sequence
  specific aptamers
ggaaggauugguaugugguacga

SEQ ID NO: 117 - RNA, 23 nt, Artificial sequence
  specific aptamers
ggaaggauugguaugugguacua

SEQ ID NO: 118 - RNA, 22 nt, Artificial sequence
  specific aptamers
ggaaggauugguaugugguaca

SEQ ID NO: 119 - RNA, 23 nt, Artificial sequence
  specific aptamers
ggaaggauugguaugugguagaa

SEQ ID NO: 120 - RNA, 23 nt, Artificial sequence
  specific aptamers
ggaaggauugguaugugguagca

SEQ ID NO: 121 - RNA, 23 nt, Artificial sequence
  specific aptamers
ggaaggauugguaugugguagga

SEQ ID NO: 122 - RNA, 23 nt, Artificial sequence
  specific aptamers
ggaaggauugguaugugguagua

SEQ ID NO: 123 - RNA, 22 nt, Artificial sequence
  specific aptamers
ggaaggauugguaugugguaga

SEQ ID NO: 124 - RNA, 23 nt, Artificial sequence
  specific aptamers
ggaaggauugguaugugguauaa

SEQ ID NO: 125 - RNA, 23 nt, Artificial sequence
  specific aptamers
ggaaggauugguaugugguauca

SEQ ID NO: 126 - RNA, 23 nt, Artificial sequence
  specific aptamers
ggaaggauugguaugugguauga

SEQ ID NO: 127 - RNA, 23 nt, Artificial sequence
  specific aptamers
ggaaggauugguaugugguauua

SEQ ID NO: 128 - RNA, 22 nt, Artificial sequence
  specific aptamers
ggaaggauugguaugugguaua

SEQ ID NO: 129 - RNA, 23 nt, Artificial sequence
  specific aptamers
gguaggaauggaaugugguaaaa

SEQ ID NO: 130 - RNA, 23 nt, Artificial sequence
  specific aptamers
gguaggaauggaaugugguaaca

SEQ ID NO: 131 - RNA, 23 nt, Artificial sequence
  specific aptamers
gguaggaauggaaugugguaaga

SEQ ID NO: 132 - RNA, 23 nt, Artificial sequence
  specific aptamers
gguaggaauggaaugugguaaua

SEQ ID NO: 133 - RNA, 22 nt, Artificial sequence
  specific aptamers
gguaggaauggaaugugguaaa

SEQ ID NO: 134 - RNA, 23 nt, Artificial sequence
  specific aptamers
gguaggaauggaaugugguacaa

SEQ ID NO: 135 - RNA, 23 nt, Artificial sequence
  specific aptamers
gguaggaauggaaugugguacca

SEQ ID NO: 136 - RNA, 23 nt, Artificial sequence
  specific aptamers
gguaggaauggaaugugguacga

SEQ ID NO: 137 - RNA, 23 nt, Artificial sequence
  specific aptamers
gguaggaauggaaugugguacua

SEQ ID NO: 138 - RNA, 22 nt, Artificial sequence
  specific aptamers
gguaggaauggaaugugguaca

SEQ ID NO: 139 - RNA, 23 nt, Artificial sequence
  specific aptamers
gguaggaauggaaugugguagaa

SEQ ID NO: 140 - RNA, 23 nt, Artificial sequence
  specific aptamers
gguaggaauggaaugugguagca

SEQ ID NO: 141 - RNA, 23 nt, Artificial sequence
  specific aptamers
gguaggaauggaaugugguagga

SEQ ID NO: 142 - RNA, 23 nt, Artificial sequence
  specific aptamers
gguaggaauggaaugugguagua

SEQ ID NO: 143 - RNA, 22 nt, Artificial sequence
  specific aptamers
gguaggaauggaaugugguaga

SEQ ID NO: 144 - RNA, 23 nt, Artificial sequence
  specific aptamers
gguaggaauggaaugugguauaa

SEQ ID NO: 145 - RNA, 23 nt, Artificial sequence
  specific aptamers
gguaggaauggaaugugguauca

SEQ ID NO: 146 - RNA, 23 nt, Artificial sequence
  specific aptamers
gguaggaauggaaugugguauga

SEQ ID NO: 147 - RNA, 23 nt, Artificial sequence
  specific aptamers
gguaggaauggaaugugguauua

SEQ ID NO: 148 - RNA, 22 nt, Artificial sequence
  specific aptamers
gguaggaauggaaugugguaua

SEQ ID NO: 149 - RNA, 23 nt, Artificial sequence
  specific aptamers
gguaggaauggcaugugguaaaa

SEQ ID NO: 150 - RNA, 23 nt, Artificial sequence
  specific aptamers
gguaggaauggcaugugguaaca

SEQ ID NO: 151 - RNA, 23 nt, Artificial sequence
  specific aptamers
gguaggaauggcaugugguaaga

SEQ ID NO: 152 - RNA, 23 nt, Artificial sequence
  specific aptamers
gguaggaauggcaugugguaaua

SEQ ID NO: 153 - RNA, 22 nt, Artificial sequence
  specific aptamers
gguaggaauggcaugugguaaa

SEQ ID NO: 154 - RNA, 23 nt, Artificial sequence
  specific aptamers
gguaggaauggcaugugguacaa

SEQ ID NO: 155 - RNA, 23 nt, Artificial sequence
  specific aptamers
gguaggaauggcaugugguacca

SEQ ID NO: 156 - RNA, 23 nt, Artificial sequence
  specific aptamers
gguaggaauggcaugugguacga

SEQ ID NO: 157 - RNA, 23 nt, Artificial sequence
  specific aptamers
gguaggaauggcaugugguacua

SEQ ID NO: 158 - RNA, 22 nt, Artificial sequence
  specific aptamers
gguaggaauggcaugugguaca

SEQ ID NO: 159 - RNA, 23 nt, Artificial sequence
  specific aptamers
gguaggaauggcaugugguagaa

SEQ ID NO: 160 - RNA, 23 nt, Artificial sequence
  specific aptamers
gguaggaauggcaugugguagca

SEQ ID NO: 161 - RNA, 23 nt, Artificial sequence
  specific aptamers
gguaggaauggcaugugguagga

SEQ ID NO: 162 - RNA, 23 nt, Artificial sequence
  specific aptamers
gguaggaauggcaugugguagua

SEQ ID NO: 163 - RNA, 22 nt, Artificial sequence
  specific aptamers
gguaggaauggcaugugguaga

SEQ ID NO: 164 - RNA, 23 nt, Artificial sequence
  specific aptamers
gguaggaauggcaugugguauaa

SEQ ID NO: 165 - RNA, 23 nt, Artificial sequence
  specific aptamers
gguaggaauggcaugugguauca

SEQ ID NO: 166 - RNA, 23 nt, Artificial sequence
  specific aptamers
gguaggaauggcaugugguauga

SEQ ID NO: 167 - RNA, 23 nt, Artificial sequence
  specific aptamers
gguaggaauggcaugugguauua

SEQ ID NO: 168 - RNA, 22 nt, Artificial sequence
  specific aptamers
gguaggaauggcaugugguaua

SEQ ID NO: 169 - RNA, 23 nt, Artificial sequence
  specific aptamers
gguaggaaugguaugugguaaaa

SEQ ID NO: 170 - RNA, 23 nt, Artificial sequence
  specific aptamers
gguaggaaugguaugugguaaca

SEQ ID NO: 171 - RNA, 23 nt, Artificial sequence
  specific aptamers
gguaggaaugguaugugguaaga

SEQ ID NO: 172 - RNA, 23 nt, Artificial sequence
  specific aptamers
gguaggaaugguaugugguaaua

SEQ ID NO: 173 - RNA, 22 nt, Artificial sequence
  specific aptamers
gguaggaaugguaugugguaaa

SEQ ID NO: 174 - RNA, 23 nt, Artificial sequence
  specific aptamers
gguaggaaugguaugugguacaa

SEQ ID NO: 175 - RNA, 23 nt, Artificial sequence
  specific aptamers
gguaggaaugguaugugguacca

SEQ ID NO: 176 - RNA, 23 nt, Artificial sequence
  specific aptamers
gguaggaaugguaugugguacga

SEQ ID NO: 177 - RNA, 23 nt, Artificial sequence
  specific aptamers
gguaggaaugguaugugguacua

SEQ ID NO: 178 - RNA, 22 nt, Artificial sequence
  specific aptamers
gguaggaaugguaugugguaca

SEQ ID NO: 179 - RNA, 23 nt, Artificial sequence
  specific aptamers
gguaggaaugguaugugguagaa

SEQ ID NO: 180 - RNA, 23 nt, Artificial sequence
  specific aptamers
gguaggaaugguaugugguagca

SEQ ID NO: 181 - RNA, 23 nt, Artificial sequence
  specific aptamers
gguaggaaugguaugugguagga

SEQ ID NO: 182 - RNA, 23 nt, Artificial sequence
  specific aptamers
gguaggaaugguaugugguagua

SEQ ID NO: 183 - RNA, 22 nt, Artificial sequence
  specific aptamers
gguaggaaugguaugugguaga

SEQ ID NO: 184 - RNA, 23 nt, Artificial sequence
  specific aptamers
gguaggaaugguaugugguauaa

SEQ ID NO: 185 - RNA, 23 nt, Artificial sequence
  specific aptamers
gguaggaaugguaugugguauca

SEQ ID NO: 186 - RNA, 23 nt, Artificial sequence
  specific aptamers
gguaggaaugguaugugguauga

SEQ ID NO: 187 - RNA, 23 nt, Artificial sequence
  specific aptamers
gguaggaaugguaugugguauua

SEQ ID NO: 188 - RNA, 22 nt, Artificial sequence
  specific aptamers
gguaggaaugguaugugguaua

SEQ ID NO: 189 - RNA, 23 nt, Artificial sequence
  specific aptamers
gguaggauuggaaugugguaaaa

SEQ ID NO: 190 - RNA, 23 nt, Artificial sequence
  specific aptamers
gguaggauuggaaugugguaaca

SEQ ID NO: 191 - RNA, 23 nt, Artificial sequence
  specific aptamers
gguaggauuggaaugugguaaga

SEQ ID NO: 192 - RNA, 23 nt, Artificial sequence
  specific aptamers
gguaggauuggaaugugguaaua

SEQ ID NO: 193 - RNA, 22 nt, Artificial sequence
  specific aptamers
gguaggauuggaaugugguaaa

SEQ ID NO: 194 - RNA, 23 nt, Artificial sequence
  specific aptamers
gguaggauuggaaugugguacaa

SEQ ID NO: 195 - RNA, 23 nt, Artificial sequence
  specific aptamers
gguaggauuggaaugugguacca

SEQ ID NO: 196 - RNA, 23 nt, Artificial sequence
  specific aptamers
gguaggauuggaaugugguacga

SEQ ID NO: 197 - RNA, 23 nt, Artificial sequence
  specific aptamers
gguaggauuggaaugugguacua

SEQ ID NO: 198 - RNA, 22 nt, Artificial sequence
  specific aptamers
gguaggauuggaaugugguaca

SEQ ID NO: 199 - RNA, 23 nt, Artificial sequence
  specific aptamers
gguaggauuggaaugugguagaa

SEQ ID NO: 200 - RNA, 23 nt, Artificial sequence
  specific aptamers
gguaggauuggaaugugguagca

SEQ ID NO: 201 - RNA, 23 nt, Artificial sequence
  specific aptamers
gguaggauuggaaugugguagga

SEQ ID NO: 202 - RNA, 23 nt, Artificial sequence
  specific aptamers
gguaggauuggaaugugguagua

SEQ ID NO: 203 - RNA, 22 nt, Artificial sequence
  specific aptamers
gguaggauuggaaugugguaga

SEQ ID NO: 204 - RNA, 23 nt, Artificial sequence
  specific aptamers
gguaggauuggaaugugguauaa

SEQ ID NO: 205 - RNA, 23 nt, Artificial sequence
  specific aptamers
gguaggauuggaaugugguauca

SEQ ID NO: 206 - RNA, 23 nt, Artificial sequence
  specific aptamers
gguaggauuggaaugugguauga

SEQ ID NO: 207 - RNA, 23 nt, Artificial sequence
  specific aptamers
gguaggauuggaaugugguauua

SEQ ID NO: 208 - RNA, 22 nt, Artificial sequence
  specific aptamers
gguaggauuggaaugugguaua

SEQ ID NO: 209 - RNA, 23 nt, Artificial sequence
  specific aptamers
gguaggauuggcaugugguaaaa

SEQ ID NO: 210 - RNA, 23 nt, Artificial sequence
  specific aptamers
gguaggauuggcaugugguaaca

SEQ ID NO: 211 - RNA, 23 nt, Artificial sequence
  specific aptamers
gguaggauuggcaugugguaaga

SEQ ID NO: 212 - RNA, 23 nt, Artificial sequence
  specific aptamers
gguaggauuggcaugugguaaua

SEQ ID NO: 213 - RNA, 22 nt, Artificial sequence
  specific aptamers
gguaggauuggcaugugguaaa

SEQ ID NO: 214 - RNA, 23 nt, Artificial sequence
  specific aptamers
gguaggauuggcaugugguacaa

SEQ ID NO: 215 - RNA, 23 nt, Artificial sequence
  specific aptamers
gguaggauuggcaugugguacca

SEQ ID NO: 216 - RNA, 23 nt, Artificial sequence
  specific aptamers
gguaggauuggcaugugguacga

SEQ ID NO: 217 - RNA, 23 nt, Artificial sequence
  specific aptamers
gguaggauuggcaugugguacua

SEQ ID NO: 218 - RNA, 22 nt, Artificial sequence
  specific aptamers
gguaggauuggcaugugguaca

SEQ ID NO: 219 - RNA, 23 nt, Artificial sequence
  specific aptamers
gguaggauuggcaugugguagaa

SEQ ID NO: 220 - RNA, 23 nt, Artificial sequence
  specific aptamers
gguaggauuggcaugugguagca

SEQ ID NO: 221 - RNA, 23 nt, Artificial sequence
  specific aptamers
gguaggauuggcaugugguagga

SEQ ID NO: 222 - RNA, 23 nt, Artificial sequence
  specific aptamers
gguaggauuggcaugugguagua

SEQ ID NO: 223 - RNA, 22 nt, Artificial sequence
  specific aptamers
gguaggauuggcaugugguaga

SEQ ID NO: 224 - RNA, 23 nt, Artificial sequence
  specific aptamers
gguaggauuggcaugugguauaa

SEQ ID NO: 225 - RNA, 23 nt, Artificial sequence
  specific aptamers
gguaggauuggcaugugguauca

SEQ ID NO: 226 - RNA, 23 nt, Artificial sequence
  specific aptamers
gguaggauuggcaugugguauga

SEQ ID NO: 227 - RNA, 23 nt, Artificial sequence
  specific aptamers
gguaggauuggcaugugguauua

SEQ ID NO: 228 - RNA, 22 nt, Artificial sequence
  specific aptamers
gguaggauuggcaugugguaua

SEQ ID NO: 229 - RNA, 23 nt, Artificial sequence
  specific aptamers
gguaggauugguaugugguaaaa

SEQ ID NO: 230 - RNA, 23 nt, Artificial sequence
  specific aptamers
gguaggauugguaugugguaaca

SEQ ID NO: 231 - RNA, 23 nt, Artificial sequence
  specific aptamers
gguaggauugguaugugguaaga

SEQ ID NO: 232 - RNA, 23 nt, Artificial sequence
  specific aptamers
gguaggauugguaugugguaaua

SEQ ID NO: 233 - RNA, 22 nt, Artificial sequence
  specific aptamers
gguaggauugguaugugguaaa

SEQ ID NO: 234 - RNA, 23 nt, Artificial sequence
  specific aptamers
gguaggauugguaugugguacaa

SEQ ID NO: 235 - RNA, 23 nt, Artificial sequence
  specific aptamers
gguaggauugguaugugguacca

SEQ ID NO: 236 - RNA, 23 nt, Artificial sequence
  specific aptamers
gguaggauugguaugugguacga

SEQ ID NO: 237 - RNA, 23 nt, Artificial sequence
  specific aptamers
gguaggauugguaugugguacua

SEQ ID NO: 238 - RNA, 22 nt, Artificial sequence
  specific aptamers
gguaggauugguaugugguaca

SEQ ID NO: 239 - RNA, 23 nt, Artificial sequence
  specific aptamers
gguaggauugguaugugguagaa

SEQ ID NO: 240 - RNA, 23 nt, Artificial sequence
  specific aptamers
gguaggauugguaugugguagca

SEQ ID NO: 241 - RNA, 23 nt, Artificial sequence
  specific aptamers
gguaggauugguaugugguagga

SEQ ID NO: 242 - RNA, 23 nt, Artificial sequence
  specific aptamers
gguaggauugguaugugguagua

SEQ ID NO: 243 - RNA, 22 nt, Artificial sequence
  specific aptamers
gguaggauugguaugugguaga

SEQ ID NO: 244 - RNA, 23 nt, Artificial sequence
  specific aptamers
gguaggauugguaugugguauaa

SEQ ID NO: 245 - RNA, 23 nt, Artificial sequence
  specific aptamers
gguaggauugguaugugguauca

SEQ ID NO: 246 - RNA, 23 nt, Artificial sequence
  specific aptamers
gguaggauugguaugugguauga

SEQ ID NO: 247 - RNA, 23 nt, Artificial sequence
  specific aptamers
gguaggauugguaugugguauua

SEQ ID NO: 248 - RNA, 22 nt, Artificial sequence
  specific aptamers
gguaggauugguaugugguaua

SEQ ID NO: 249 - RNA, 23 nt, Artificial sequence
  specific aptamers
ggaaggaauggaaugugguaaau

SEQ ID NO: 250 - RNA, 23 nt, Artificial sequence
  specific aptamers
ggaaggaauggaaugugguaacu

SEQ ID NO: 251 - RNA, 23 nt, Artificial sequence
  specific aptamers
ggaaggaauggaaugugguaagu

SEQ ID NO: 252 - RNA, 23 nt, Artificial sequence
  specific aptamers
ggaaggaauggaaugugguaauu

SEQ ID NO: 253 - RNA, 22 nt, Artificial sequence
  specific aptamers
ggaaggaauggaaugugguaau

SEQ ID NO: 254 - RNA, 23 nt, Artificial sequence
  specific aptamers
ggaaggaauggaaugugguacau

SEQ ID NO: 255 - RNA, 23 nt, Artificial sequence
  specific aptamers
ggaaggaauggaaugugguaccu

SEQ ID NO: 256 - RNA, 23 nt, Artificial sequence
  specific aptamers
ggaaggaauggaaugugguacgu

SEQ ID NO: 257 - RNA, 23 nt, Artificial sequence
  specific aptamers
ggaaggaauggaaugugguacuu

SEQ ID NO: 258 - RNA, 22 nt, Artificial sequence
  specific aptamers
ggaaggaauggaaugugguacu

SEQ ID NO: 259 - RNA, 23 nt, Artificial sequence
  specific aptamers
ggaaggaauggaaugugguagau

SEQ ID NO: 260 - RNA, 23 nt, Artificial sequence
  specific aptamers
ggaaggaauggaaugugguagcu

SEQ ID NO: 261 - RNA, 23 nt, Artificial sequence
  specific aptamers
ggaaggaauggaaugugguaggu

SEQ ID NO: 262 - RNA, 23 nt, Artificial sequence
  specific aptamers
ggaaggaauggaaugugguaguu

SEQ ID NO: 263 - RNA, 22 nt, Artificial sequence
  specific aptamers
ggaaggaauggaaugugguagu

SEQ ID NO: 264 - RNA, 23 nt, Artificial sequence
  specific aptamers
ggaaggaauggaaugugguauau

SEQ ID NO: 265 - RNA, 23 nt, Artificial sequence
  specific aptamers
ggaaggaauggaaugugguaucu

SEQ ID NO: 266 - RNA, 23 nt, Artificial sequence
  specific aptamers
ggaaggaauggaaugugguaugu

SEQ ID NO: 267 - RNA, 23 nt, Artificial sequence
  specific aptamers
ggaaggaauggaaugugguauuu

SEQ ID NO: 268 - RNA, 22 nt, Artificial sequence
  specific aptamers
ggaaggaauggaaugugguauu

SEQ ID NO: 269 - RNA, 23 nt, Artificial sequence
  specific aptamers
ggaaggaauggcaugugguaaau

SEQ ID NO: 270 - RNA, 23 nt, Artificial sequence
  specific aptamers
ggaaggaauggcaugugguaacu

SEQ ID NO: 271 - RNA, 23 nt, Artificial sequence
  specific aptamers
ggaaggaauggcaugugguaagu

SEQ ID NO: 272 - RNA, 23 nt, Artificial sequence
  specific aptamers
ggaaggaauggcaugugguaauu

SEQ ID NO: 273 - RNA, 22 nt, Artificial sequence
  specific aptamers
ggaaggaauggcaugugguaau

SEQ ID NO: 274 - RNA, 23 nt, Artificial sequence
  specific aptamers
ggaaggaauggcaugugguacau

SEQ ID NO: 275 - RNA, 23 nt, Artificial sequence
  specific aptamers
ggaaggaauggcaugugguaccu

SEQ ID NO: 276 - RNA, 23 nt, Artificial sequence
  specific aptamers
ggaaggaauggcaugugguacgu

SEQ ID NO: 277 - RNA, 23 nt, Artificial sequence
  specific aptamers
ggaaggaauggcaugugguacuu

SEQ ID NO: 278 - RNA, 22 nt, Artificial sequence
  specific aptamers
ggaaggaauggcaugugguacu

SEQ ID NO: 279 - RNA, 23 nt, Artificial sequence
  specific aptamers
ggaaggaauggcaugugguagau

SEQ ID NO: 280 - RNA, 23 nt, Artificial sequence
  specific aptamers
ggaaggaauggcaugugguagcu

SEQ ID NO: 281 - RNA, 23 nt, Artificial sequence
  specific aptamers
ggaaggaauggcaugugguaggu

SEQ ID NO: 282 - RNA, 23 nt, Artificial sequence
  specific aptamers
ggaaggaauggcaugugguaguu

SEQ ID NO: 283 - RNA, 22 nt, Artificial sequence
  specific aptamers
ggaaggaauggcaugugguagu

SEQ ID NO: 284 - RNA, 23 nt, Artificial sequence
  specific aptamers
ggaaggaauggcaugugguauau

SEQ ID NO: 285 - RNA, 23 nt, Artificial sequence
  specific aptamers
ggaaggaauggcaugugguaucu

SEQ ID NO: 286 - RNA, 23 nt, Artificial sequence
  specific aptamers
ggaaggaauggcaugugguaugu

SEQ ID NO: 287 - RNA, 23 nt, Artificial sequence
  specific aptamers
ggaaggaauggcaugugguauuu

SEQ ID NO: 288 - RNA, 22 nt, Artificial sequence
  specific aptamers
ggaaggaauggcaugugguauu

SEQ ID NO: 289 - RNA, 23 nt, Artificial sequence
  specific aptamers
ggaaggaaugguaugugguaaau

SEQ ID NO: 290 - RNA, 23 nt, Artificial sequence
  specific aptamers
ggaaggaaugguaugugguaacu

SEQ ID NO: 291 - RNA, 23 nt, Artificial sequence
  specific aptamers
ggaaggaaugguaugugguaagu

SEQ ID NO: 292 - RNA, 23 nt, Artificial sequence
  specific aptamers
ggaaggaaugguaugugguaauu

SEQ ID NO: 293 - RNA, 22 nt, Artificial sequence
  specific aptamers
ggaaggaaugguaugugguaau

SEQ ID NO: 294 - RNA, 23 nt, Artificial sequence
  specific aptamers
ggaaggaaugguaugugguacau

SEQ ID NO: 295 - RNA, 23 nt, Artificial sequence
  specific aptamers
ggaaggaaugguaugugguaccu

SEQ ID NO: 296 - RNA, 23 nt, Artificial sequence
  specific aptamers
ggaaggaaugguaugugguacgu

SEQ ID NO: 297 - RNA, 23 nt, Artificial sequence
  specific aptamers
ggaaggaaugguaugugguacuu

SEQ ID NO: 298 - RNA, 22 nt, Artificial sequence
  specific aptamers
ggaaggaaugguaugugguacu

SEQ ID NO: 299 - RNA, 23 nt, Artificial sequence
  specific aptamers
ggaaggaaugguaugugguagau

SEQ ID NO: 300 - RNA, 23 nt, Artificial sequence
  specific aptamers
ggaaggaaugguaugugguagcu

SEQ ID NO: 301 - RNA, 23 nt, Artificial sequence
  specific aptamers
ggaaggaaugguaugugguaggu

SEQ ID NO: 302 - RNA, 23 nt, Artificial sequence
  specific aptamers
ggaaggaaugguaugugguaguu

SEQ ID NO: 303 - RNA, 22 nt, Artificial sequence
  specific aptamers
ggaaggaaugguaugugguagu

SEQ ID NO: 304 - RNA, 23 nt, Artificial sequence
  specific aptamers
ggaaggaaugguaugugguauau

SEQ ID NO: 305 - RNA, 23 nt, Artificial sequence
  specific aptamers
ggaaggaaugguaugugguaucu

SEQ ID NO: 306 - RNA, 23 nt, Artificial sequence
  specific aptamers
ggaaggaaugguaugugguaugu

SEQ ID NO: 307 - RNA, 23 nt, Artificial sequence
  specific aptamers
ggaaggaaugguaugugguauuu

SEQ ID NO: 308 - RNA, 22 nt, Artificial sequence
  specific aptamers
ggaaggaaugguaugugguauu

SEQ ID NO: 309 - RNA, 23 nt, Artificial sequence
  specific aptamers
ggaaggauuggaaugugguaaau

SEQ ID NO: 310 - RNA, 23 nt, Artificial sequence
  specific aptamers
ggaaggauuggaaugugguaacu

SEQ ID NO: 311 - RNA, 23 nt, Artificial sequence
  specific aptamers
ggaaggauuggaaugugguaagu

SEQ ID NO: 312 - RNA, 23 nt, Artificial sequence
  specific aptamers
ggaaggauuggaaugugguaauu

SEQ ID NO: 313 - RNA, 22 nt, Artificial sequence
  specific aptamers
ggaaggauuggaaugugguaau

SEQ ID NO: 314 - RNA, 23 nt, Artificial sequence
  specific aptamers
ggaaggauuggaaugugguacau

SEQ ID NO: 315 - RNA, 23 nt, Artificial sequence
  specific aptamers
ggaaggauuggaaugugguaccu

SEQ ID NO: 316 - RNA, 23 nt, Artificial sequence
  specific aptamers
ggaaggauuggaaugugguacgu

SEQ ID NO: 317 - RNA, 23 nt, Artificial sequence
  specific aptamers
ggaaggauuggaaugugguacuu

SEQ ID NO: 318 - RNA, 22 nt, Artificial sequence
  specific aptamers
ggaaggauuggaaugugguacu

SEQ ID NO: 319 - RNA, 23 nt, Artificial sequence
  specific aptamers
ggaaggauuggaaugugguagau

SEQ ID NO: 320 - RNA, 23 nt, Artificial sequence
  specific aptamers
ggaaggauuggaaugugguagcu

SEQ ID NO: 321 - RNA, 23 nt, Artificial sequence
  specific aptamers
ggaaggauuggaaugugguaggu

SEQ ID NO: 322 - RNA, 23 nt, Artificial sequence
  specific aptamers
ggaaggauuggaaugugguaguu

SEQ ID NO: 323 - RNA, 22 nt, Artificial sequence
  specific aptamers
ggaaggauuggaaugugguagu

SEQ ID NO: 324 - RNA, 23 nt, Artificial sequence
  specific aptamers
ggaaggauuggaaugugguauau

SEQ ID NO: 325 - RNA, 23 nt, Artificial sequence
  specific aptamers
ggaaggauuggaaugugguaucu

SEQ ID NO: 326 - RNA, 23 nt, Artificial sequence
  specific aptamers
ggaaggauuggaaugugguaugu

SEQ ID NO: 327 - RNA, 23 nt, Artificial sequence
  specific aptamers
ggaaggauuggaaugugguauuu

SEQ ID NO: 328 - RNA, 22 nt, Artificial sequence
  specific aptamers
ggaaggauuggaaugugguauu

SEQ ID NO: 329 - RNA, 23 nt, Artificial sequence
  specific aptamers
ggaaggauuggcaugugguaaau

SEQ ID NO: 330 - RNA, 23 nt, Artificial sequence
  specific aptamers
ggaaggauuggcaugugguaacu

SEQ ID NO: 331 - RNA, 23 nt, Artificial sequence
  specific aptamers
ggaaggauuggcaugugguaagu

SEQ ID NO: 332 - RNA, 23 nt, Artificial sequence
  specific aptamers
ggaaggauuggcaugugguaauu

SEQ ID NO: 333 - RNA, 22 nt, Artificial sequence
  specific aptamers
ggaaggauuggcaugugguaau

SEQ ID NO: 334 - RNA, 23 nt, Artificial sequence
  specific aptamers
ggaaggauuggcaugugguacau

SEQ ID NO: 335 - RNA, 23 nt, Artificial sequence
  specific aptamers
ggaaggauuggcaugugguaccu

SEQ ID NO: 336 - RNA, 23 nt, Artificial sequence
  specific aptamers
ggaaggauuggcaugugguacgu

SEQ ID NO: 337 - RNA, 23 nt, Artificial sequence
  specific aptamers
ggaaggauuggcaugugguacuu

SEQ ID NO: 338 - RNA, 22 nt, Artificial sequence
  specific aptamers
ggaaggauuggcaugugguacu

SEQ ID NO: 339 - RNA, 23 nt, Artificial sequence
  specific aptamers
ggaaggauuggcaugugguagau

SEQ ID NO: 340 - RNA, 23 nt, Artificial sequence
  specific aptamers
ggaaggauuggcaugugguagcu

SEQ ID NO: 341 - RNA, 23 nt, Artificial sequence
  specific aptamers
ggaaggauuggcaugugguaggu

SEQ ID NO: 342 - RNA, 23 nt, Artificial sequence
  specific aptamers
ggaaggauuggcaugugguaguu

SEQ ID NO: 343 - RNA, 22 nt, Artificial sequence
  specific aptamers
ggaaggauuggcaugugguagu

SEQ ID NO: 344 - RNA, 23 nt, Artificial sequence
  specific aptamers
ggaaggauuggcaugugguauau

SEQ ID NO: 345 - RNA, 23 nt, Artificial sequence
  specific aptamers
ggaaggauuggcaugugguaucu

SEQ ID NO: 346 - RNA, 23 nt, Artificial sequence
  specific aptamers
ggaaggauuggcaugugguaugu

SEQ ID NO: 347 - RNA, 23 nt, Artificial sequence
  specific aptamers
ggaaggauuggcaugugguauuu

SEQ ID NO: 348 - RNA, 22 nt, Artificial sequence
  specific aptamers
ggaaggauuggcaugugguauu

SEQ ID NO: 349 - RNA, 23 nt, Artificial sequence
  specific aptamers
ggaaggauugguaugugguaaau

SEQ ID NO: 350 - RNA, 23 nt, Artificial sequence
  specific aptamers
ggaaggauugguaugugguaacu

SEQ ID NO: 351 - RNA, 23 nt, Artificial sequence
  specific aptamers
ggaaggauugguaugugguaagu

SEQ ID NO: 352 - RNA, 23 nt, Artificial sequence
  specific aptamers
ggaaggauugguaugugguaauu

SEQ ID NO: 353 - RNA, 22 nt, Artificial sequence
  specific aptamers
ggaaggauugguaugugguaau

SEQ ID NO: 354 - RNA, 23 nt, Artificial sequence
  specific aptamers
ggaaggauugguaugugguacau

SEQ ID NO: 355 - RNA, 23 nt, Artificial sequence
  specific aptamers
ggaaggauugguaugugguaccu

SEQ ID NO: 356 - RNA, 23 nt, Artificial sequence
  specific aptamers
ggaaggauugguaugugguacgu

SEQ ID NO: 357 - RNA, 23 nt, Artificial sequence
  specific aptamers
ggaaggauugguaugugguacuu

SEQ ID NO: 358 - RNA, 22 nt, Artificial sequence
  specific aptamers
ggaaggauugguaugugguacu

SEQ ID NO: 359 - RNA, 23 nt, Artificial sequence
  specific aptamers
ggaaggauugguaugugguagau

SEQ ID NO: 360 - RNA, 23 nt, Artificial sequence
  specific aptamers
ggaaggauugguaugugguagcu

SEQ ID NO: 361 - RNA, 23 nt, Artificial sequence
  specific aptamers
ggaaggauugguaugugguaggu

SEQ ID NO: 362 - RNA, 23 nt, Artificial sequence
  specific aptamers
ggaaggauugguaugugguaguu

SEQ ID NO: 363 - RNA, 22 nt, Artificial sequence
  specific aptamers
ggaaggauugguaugugguagu

SEQ ID NO: 364 - RNA, 23 nt, Artificial sequence
  specific aptamers
ggaaggauugguaugugguauau

SEQ ID NO: 365 - RNA, 23 nt, Artificial sequence
  specific aptamers
ggaaggauugguaugugguaucu

SEQ ID NO: 366 - RNA, 23 nt, Artificial sequence
  specific aptamers
ggaaggauugguaugugguaugu

SEQ ID NO: 367 - RNA, 23 nt, Artificial sequence
  specific aptamers
ggaaggauugguaugugguauuu

SEQ ID NO: 368 - RNA, 22 nt, Artificial sequence
  specific aptamers
ggaaggauugguaugugguauu

SEQ ID NO: 369 - RNA, 23 nt, Artificial sequence
  specific aptamers
gguaggaauggaaugugguaaau

SEQ ID NO: 370 - RNA, 23 nt, Artificial sequence
  specific aptamers
gguaggaauggaaugugguaacu

SEQ ID NO: 371 - RNA, 23 nt, Artificial sequence
  specific aptamers
gguaggaauggaaugugguaagu

SEQ ID NO: 372 - RNA, 23 nt, Artificial sequence
  specific aptamers
gguaggaauggaaugugguaauu

SEQ ID NO: 373 - RNA, 22 nt, Artificial sequence
  specific aptamers
gguaggaauggaaugugguaau

SEQ ID NO: 374 - RNA, 23 nt, Artificial sequence
  specific aptamers
gguaggaauggaaugugguacau

SEQ ID NO: 375 - RNA, 23 nt, Artificial sequence
  specific aptamers
gguaggaauggaaugugguaccu

SEQ ID NO: 376 - RNA, 23 nt, Artificial sequence
  specific aptamers
gguaggaauggaaugugguacgu

SEQ ID NO: 377 - RNA, 23 nt, Artificial sequence
  specific aptamers
gguaggaauggaaugugguacuu

SEQ ID NO: 378 - RNA, 22 nt, Artificial sequence
  specific aptamers
gguaggaauggaaugugguacu

SEQ ID NO: 379 - RNA, 23 nt, Artificial sequence
  specific aptamers
gguaggaauggaaugugguagau

SEQ ID NO: 380 - RNA, 23 nt, Artificial sequence
  specific aptamers
gguaggaauggaaugugguagcu

SEQ ID NO: 381 - RNA, 23 nt, Artificial sequence
  specific aptamers
gguaggaauggaaugugguaggu

SEQ ID NO: 382 - RNA, 23 nt, Artificial sequence
  specific aptamers
gguaggaauggaaugugguaguu

SEQ ID NO: 383 - RNA, 22 nt, Artificial sequence
  specific aptamers
gguaggaauggaaugugguagu

SEQ ID NO: 384 - RNA, 23 nt, Artificial sequence
  specific aptamers
gguaggaauggaaugugguauau

SEQ ID NO: 385 - RNA, 23 nt, Artificial sequence
  specific aptamers
gguaggaauggaaugugguaucu

SEQ ID NO: 386 - RNA, 23 nt, Artificial sequence
  specific aptamers
gguaggaauggaaugugguaugu

SEQ ID NO: 387 - RNA, 23 nt, Artificial sequence
  specific aptamers
gguaggaauggaaugugguauuu

SEQ ID NO: 388 - RNA, 22 nt, Artificial sequence
  specific aptamers
gguaggaauggaaugugguauu

SEQ ID NO: 389 - RNA, 23 nt, Artificial sequence
  specific aptamers
gguaggaauggcaugugguaaau

SEQ ID NO: 390 - RNA, 23 nt, Artificial sequence
  specific aptamers
gguaggaauggcaugugguaacu

SEQ ID NO: 391 - RNA, 23 nt, Artificial sequence
  specific aptamers
gguaggaauggcaugugguaagu

SEQ ID NO: 392 - RNA, 23 nt, Artificial sequence
  specific aptamers
gguaggaauggcaugugguaauu

SEQ ID NO: 393 - RNA, 22 nt, Artificial sequence
  specific aptamers
gguaggaauggcaugugguaau

SEQ ID NO: 394 - RNA, 23 nt, Artificial sequence
  specific aptamers
gguaggaauggcaugugguacau

SEQ ID NO: 395 - RNA, 23 nt, Artificial sequence
  specific aptamers
gguaggaauggcaugugguaccu

SEQ ID NO: 396 - RNA, 23 nt, Artificial sequence
  specific aptamers
gguaggaauggcaugugguacgu

SEQ ID NO: 397 - RNA, 23 nt, Artificial sequence
  specific aptamers
gguaggaauggcaugugguacuu

SEQ ID NO: 398 - RNA, 22 nt, Artificial sequence
  specific aptamers
gguaggaauggcaugugguacu

SEQ ID NO: 399 - RNA, 23 nt, Artificial sequence
  specific aptamers
gguaggaauggcaugugguagau

SEQ ID NO: 400 - RNA, 23 nt, Artificial sequence
  specific aptamers
gguaggaauggcaugugguagcu

SEQ ID NO: 401 - RNA, 23 nt, Artificial sequence
  specific aptamers
gguaggaauggcaugugguaggu

SEQ ID NO: 402 - RNA, 23 nt, Artificial sequence
  specific aptamers
gguaggaauggcaugugguaguu

SEQ ID NO: 403 - RNA, 22 nt, Artificial sequence
  specific aptamers
gguaggaauggcaugugguagu

SEQ ID NO: 404 - RNA, 23 nt, Artificial sequence
  specific aptamers
gguaggaauggcaugugguauau

SEQ ID NO: 405 - RNA, 23 nt, Artificial sequence
  specific aptamers
gguaggaauggcaugugguaucu

SEQ ID NO: 406 - RNA, 23 nt, Artificial sequence
  specific aptamers
gguaggaauggcaugugguaugu

SEQ ID NO: 407 - RNA, 23 nt, Artificial sequence
  specific aptamers
gguaggaauggcaugugguauuu

SEQ ID NO: 408 - RNA, 22 nt, Artificial sequence
  specific aptamers
gguaggaauggcaugugguauu

SEQ ID NO: 409 - RNA, 23 nt, Artificial sequence
  specific aptamers
gguaggaaugguaugugguaaau

SEQ ID NO: 410 - RNA, 23 nt, Artificial sequence
  specific aptamers
gguaggaaugguaugugguaacu

SEQ ID NO: 411 - RNA, 23 nt, Artificial sequence
  specific aptamers
gguaggaaugguaugugguaagu

SEQ ID NO: 412 - RNA, 23 nt, Artificial sequence
  specific aptamers
gguaggaaugguaugugguaauu

SEQ ID NO: 413 - RNA, 22 nt, Artificial sequence
  specific aptamers
gguaggaaugguaugugguaau

SEQ ID NO: 414 - RNA, 23 nt, Artificial sequence
  specific aptamers
gguaggaaugguaugugguacau

SEQ ID NO: 415 - RNA, 23 nt, Artificial sequence
  specific aptamers
gguaggaaugguaugugguaccu

SEQ ID NO: 416 - RNA, 23 nt, Artificial sequence
  specific aptamers
gguaggaaugguaugugguacgu

SEQ ID NO: 417 - RNA, 23 nt, Artificial sequence
  specific aptamers
gguaggaaugguaugugguacuu

SEQ ID NO: 418 - RNA, 22 nt, Artificial sequence
  specific aptamers
gguaggaaugguaugugguacu

SEQ ID NO: 419 - RNA, 23 nt, Artificial sequence
  specific aptamers
gguaggaaugguaugugguagau

SEQ ID NO: 420 - RNA, 23 nt, Artificial sequence
  specific aptamers
gguaggaaugguaugugguagcu

SEQ ID NO: 421 - RNA, 23 nt, Artificial sequence
  specific aptamers
gguaggaaugguaugugguaggu

SEQ ID NO: 422 - RNA, 23 nt, Artificial sequence
  specific aptamers
gguaggaaugguaugugguaguu

SEQ ID NO: 423 - RNA, 22 nt, Artificial sequence
  specific aptamers
gguaggaaugguaugugguagu

SEQ ID NO: 424 - RNA, 23 nt, Artificial sequence
  specific aptamers
gguaggaaugguaugugguauau

SEQ ID NO: 425 - RNA, 23 nt, Artificial sequence
  specific aptamers
gguaggaaugguaugugguaucu

SEQ ID NO: 426 - RNA, 23 nt, Artificial sequence
  specific aptamers
gguaggaaugguaugugguaugu

SEQ ID NO: 427 - RNA, 23 nt, Artificial sequence
  specific aptamers
gguaggaaugguaugugguauuu

SEQ ID NO: 428 - RNA, 22 nt, Artificial sequence
  specific aptamers
gguaggaaugguaugugguauu

SEQ ID NO: 429 - RNA, 23 nt, Artificial sequence
  specific aptamers
gguaggauuggaaugugguaaau

SEQ ID NO: 430 - RNA, 23 nt, Artificial sequence
  specific aptamers
gguaggauuggaaugugguaacu

SEQ ID NO: 431 - RNA, 23 nt, Artificial sequence
  specific aptamers
gguaggauuggaaugugguaagu

SEQ ID NO: 432 - RNA, 23 nt, Artificial sequence
  specific aptamers
gguaggauuggaaugugguaauu

SEQ ID NO: 433 - RNA, 22 nt, Artificial sequence
  specific aptamers
gguaggauuggaaugugguaau

SEQ ID NO: 434 - RNA, 23 nt, Artificial sequence
  specific aptamers
gguaggauuggaaugugguacau

SEQ ID NO: 435 - RNA, 23 nt, Artificial sequence
  specific aptamers
gguaggauuggaaugugguaccu

SEQ ID NO: 436 - RNA, 23 nt, Artificial sequence
  specific aptamers
gguaggauuggaaugugguacgu

SEQ ID NO: 437 - RNA, 23 nt, Artificial sequence
  specific aptamers
gguaggauuggaaugugguacuu

SEQ ID NO: 438 - RNA, 22 nt, Artificial sequence
  specific aptamers
gguaggauuggaaugugguacu

SEQ ID NO: 439 - RNA, 23 nt, Artificial sequence
  specific aptamers
gguaggauuggaaugugguagau

SEQ ID NO: 440 - RNA, 23 nt, Artificial sequence
  specific aptamers
gguaggauuggaaugugguagcu

SEQ ID NO: 441 - RNA, 23 nt, Artificial sequence
  specific aptamers
gguaggauuggaaugugguaggu

SEQ ID NO: 442 - RNA, 23 nt, Artificial sequence
  specific aptamers
gguaggauuggaaugugguaguu

SEQ ID NO: 443 - RNA, 22 nt, Artificial sequence
  specific aptamers
gguaggauuggaaugugguagu

SEQ ID NO: 444 - RNA, 23 nt, Artificial sequence
  specific aptamers
gguaggauuggaaugugguauau

SEQ ID NO: 445 - RNA, 23 nt, Artificial sequence
  specific aptamers
gguaggauuggaaugugguaucu

SEQ ID NO: 446 - RNA, 23 nt, Artificial sequence
  specific aptamers
gguaggauuggaaugugguaugu

SEQ ID NO: 447 - RNA, 23 nt, Artificial sequence
  specific aptamers
gguaggauuggaaugugguauuu

SEQ ID NO: 448 - RNA, 22 nt, Artificial sequence
  specific aptamers
gguaggauuggaaugugguauu

SEQ ID NO: 449 - RNA, 23 nt, Artificial sequence
  specific aptamers
gguaggauuggcaugugguaaau

SEQ ID NO: 450 - RNA, 23 nt, Artificial sequence
  specific aptamers
gguaggauuggcaugugguaacu

SEQ ID NO: 451 - RNA, 23 nt, Artificial sequence
  specific aptamers
gguaggauuggcaugugguaagu

SEQ ID NO: 452 - RNA, 23 nt, Artificial sequence
  specific aptamers
gguaggauuggcaugugguaauu

SEQ ID NO: 453 - RNA, 22 nt, Artificial sequence
  specific aptamers
gguaggauuggcaugugguaau

SEQ ID NO: 454 - RNA, 23 nt, Artificial sequence
  specific aptamers
gguaggauuggcaugugguacau

SEQ ID NO: 455 - RNA, 23 nt, Artificial sequence
  specific aptamers
gguaggauuggcaugugguaccu

SEQ ID NO: 456 - RNA, 23 nt, Artificial sequence
  specific aptamers
gguaggauuggcaugugguacgu

SEQ ID NO: 457 - RNA, 23 nt, Artificial sequence
  specific aptamers
gguaggauuggcaugugguacuu

SEQ ID NO: 458 - RNA, 22 nt, Artificial sequence
  specific aptamers
gguaggauuggcaugugguacu

SEQ ID NO: 459 - RNA, 23 nt, Artificial sequence
  specific aptamers
gguaggauuggcaugugguagau

SEQ ID NO: 460 - RNA, 23 nt, Artificial sequence
  specific aptamers
gguaggauuggcaugugguagcu

SEQ ID NO: 461 - RNA, 23 nt, Artificial sequence
  specific aptamers
gguaggauuggcaugugguaggu

SEQ ID NO: 462 - RNA, 23 nt, Artificial sequence
  specific aptamers
gguaggauuggcaugugguaguu

SEQ ID NO: 463 - RNA, 22 nt, Artificial sequence
  specific aptamers
gguaggauuggcaugugguagu

SEQ ID NO: 464 - RNA, 23 nt, Artificial sequence
  specific aptamers
gguaggauuggcaugugguauau

SEQ ID NO: 465 - RNA, 23 nt, Artificial sequence
  specific aptamers
gguaggauuggcaugugguaucu

SEQ ID NO: 466 - RNA, 23 nt, Artificial sequence
  specific aptamers
gguaggauuggcaugugguaugu

SEQ ID NO: 467 - RNA, 23 nt, Artificial sequence
  specific aptamers
gguaggauuggcaugugguauuu

SEQ ID NO: 468 - RNA, 22 nt, Artificial sequence
  specific aptamers
gguaggauuggcaugugguauu

SEQ ID NO: 469 - RNA, 23 nt, Artificial sequence
  specific aptamers
gguaggauugguaugugguaaau

SEQ ID NO: 470 - RNA, 23 nt, Artificial sequence
  specific aptamers
gguaggauugguaugugguaacu

SEQ ID NO: 471 - RNA, 23 nt, Artificial sequence
  specific aptamers
gguaggauugguaugugguaagu

SEQ ID NO: 472 - RNA, 23 nt, Artificial sequence
  specific aptamers
gguaggauugguaugugguaauu

SEQ ID NO: 473 - RNA, 22 nt, Artificial sequence
  specific aptamers
gguaggauugguaugugguaau

SEQ ID NO: 474 - RNA, 23 nt, Artificial sequence
  specific aptamers
gguaggauugguaugugguacau

SEQ ID NO: 475 - RNA, 23 nt, Artificial sequence
  specific aptamers
gguaggauugguaugugguaccu

SEQ ID NO: 476 - RNA, 23 nt, Artificial sequence
  specific aptamers
gguaggauugguaugugguacgu

SEQ ID NO: 477 - RNA, 23 nt, Artificial sequence
  specific aptamers
gguaggauugguaugugguacuu

SEQ ID NO: 478 - RNA, 22 nt, Artificial sequence
  specific aptamers
gguaggauugguaugugguacu

SEQ ID NO: 479 - RNA, 23 nt, Artificial sequence
  specific aptamers
gguaggauugguaugugguagau

SEQ ID NO: 480 - RNA, 23 nt, Artificial sequence
  specific aptamers
gguaggauugguaugugguagcu

SEQ ID NO: 481 - RNA, 23 nt, Artificial sequence
  specific aptamers
gguaggauugguaugugguaggu

SEQ ID NO: 482 - RNA, 23 nt, Artificial sequence
  specific aptamers
gguaggauugguaugugguaguu

SEQ ID NO: 483 - RNA, 22 nt, Artificial sequence
  specific aptamers
gguaggauugguaugugguagu

SEQ ID NO: 484 - RNA, 23 nt, Artificial sequence
  specific aptamers
gguaggauugguaugugguauau

SEQ ID NO: 485 - RNA, 23 nt, Artificial sequence
  specific aptamers
gguaggauugguaugugguaucu

SEQ ID NO: 486 - RNA, 23 nt, Artificial sequence
  specific aptamers
gguaggauugguaugugguaugu

SEQ ID NO: 487 - RNA, 23 nt, Artificial sequence
  specific aptamers
gguaggauugguaugugguauuu

SEQ ID NO: 488 - RNA, 22 nt, Artificial sequence
  specific aptamers
gguaggauugguaugugguauu

SEQ ID NO: 489 - RNA, 23 nt, Artificial sequence
  specific aptamers
ggaaggaauggaaugggguaaau

SEQ ID NO: 490 - RNA, 23 nt, Artificial sequence
  specific aptamers
ggaaggaauggaaugggguaacu

SEQ ID NO: 491 - RNA, 23 nt, Artificial sequence
  specific aptamers
ggaaggaauggaaugggguaagu

SEQ ID NO: 492 - RNA, 23 nt, Artificial sequence
  specific aptamers
ggaaggaauggaaugggguaauu

SEQ ID NO: 493 - RNA, 22 nt, Artificial sequence
  specific aptamers
ggaaggaauggaaugggguaau

SEQ ID NO: 494 - RNA, 23 nt, Artificial sequence
  specific aptamers
ggaaggaauggaaugggguacau

SEQ ID NO: 495 - RNA, 23 nt, Artificial sequence
  specific aptamers
ggaaggaauggaaugggguaccu

SEQ ID NO: 496 - RNA, 23 nt, Artificial sequence
  specific aptamers
ggaaggaauggaaugggguacgu

SEQ ID NO: 497 - RNA, 23 nt, Artificial sequence
  specific aptamers
ggaaggaauggaaugggguacuu

SEQ ID NO: 498 - RNA, 22 nt, Artificial sequence
  specific aptamers
ggaaggaauggaaugggguacu

SEQ ID NO: 499 - RNA, 23 nt, Artificial sequence
  specific aptamers
ggaaggaauggaaugggguagau

SEQ ID NO: 500 - RNA, 23 nt, Artificial sequence
  specific aptamers
ggaaggaauggaaugggguagcu

SEQ ID NO: 501 - RNA, 23 nt, Artificial sequence
  specific aptamers
ggaaggaauggaaugggguaggu

SEQ ID NO: 502 - RNA, 23 nt, Artificial sequence
  specific aptamers
ggaaggaauggaaugggguaguu

SEQ ID NO: 503 - RNA, 22 nt, Artificial sequence
  specific aptamers
ggaaggaauggaaugggguagu

SEQ ID NO: 504 - RNA, 23 nt, Artificial sequence
  specific aptamers
ggaaggaauggaaugggguauau

SEQ ID NO: 505 - RNA, 23 nt, Artificial sequence
  specific aptamers
ggaaggaauggaaugggguaucu

SEQ ID NO: 506 - RNA, 23 nt, Artificial sequence
  specific aptamers
ggaaggaauggaaugggguaugu

SEQ ID NO: 507 - RNA, 23 nt, Artificial sequence
  specific aptamers
ggaaggaauggaaugggguauuu

SEQ ID NO: 508 - RNA, 22 nt, Artificial sequence
  specific aptamers
ggaaggaauggaaugggguauu

SEQ ID NO: 509 - RNA, 23 nt, Artificial sequence
  specific aptamers
ggaaggaauggcaugggguaaau

SEQ ID NO: 510 - RNA, 23 nt, Artificial sequence
  specific aptamers
ggaaggaauggcaugggguaacu

SEQ ID NO: 511 - RNA, 23 nt, Artificial sequence
  specific aptamers
ggaaggaauggcaugggguaagu

SEQ ID NO: 512 - RNA, 23 nt, Artificial sequence
  specific aptamers
ggaaggaauggcaugggguaauu

SEQ ID NO: 513 - RNA, 22 nt, Artificial sequence
  specific aptamers
ggaaggaauggcaugggguaau

SEQ ID NO: 514 - RNA, 23 nt, Artificial sequence
  specific aptamers
ggaaggaauggcaugggguacau

SEQ ID NO: 515 - RNA, 23 nt, Artificial sequence
  specific aptamers
ggaaggaauggcaugggguaccu

SEQ ID NO: 516 - RNA, 23 nt, Artificial sequence
  specific aptamers
ggaaggaauggcaugggguacgu

SEQ ID NO: 517 - RNA, 23 nt, Artificial sequence
  specific aptamers
ggaaggaauggcaugggguacuu

SEQ ID NO: 518 - RNA, 22 nt, Artificial sequence
  specific aptamers
ggaaggaauggcaugggguacu

SEQ ID NO: 519 - RNA, 23 nt, Artificial sequence
  specific aptamers
ggaaggaauggcaugggguagau

SEQ ID NO: 520 - RNA, 23 nt, Artificial sequence
  specific aptamers
ggaaggaauggcaugggguagcu

SEQ ID NO: 521 - RNA, 23 nt, Artificial sequence
  specific aptamers
ggaaggaauggcaugggguaggu

SEQ ID NO: 522 - RNA, 23 nt, Artificial sequence
  specific aptamers
ggaaggaauggcaugggguaguu

SEQ ID NO: 523 - RNA, 22 nt, Artificial sequence
  specific aptamers
ggaaggaauggcaugggguagu

SEQ ID NO: 524 - RNA, 23 nt, Artificial sequence
  specific aptamers
ggaaggaauggcaugggguauau

SEQ ID NO: 525 - RNA, 23 nt, Artificial sequence
  specific aptamers
ggaaggaauggcaugggguaucu

SEQ ID NO: 526 - RNA, 23 nt, Artificial sequence
  specific aptamers
ggaaggaauggcaugggguaugu

SEQ ID NO: 527 - RNA, 23 nt, Artificial sequence
  specific aptamers
ggaaggaauggcaugggguauuu

SEQ ID NO: 528 - RNA, 22 nt, Artificial sequence
  specific aptamers
ggaaggaauggcaugggguauu

SEQ ID NO: 529 - RNA, 23 nt, Artificial sequence
  specific aptamers
ggaaggaaugguaugggguaaau

SEQ ID NO: 530 - RNA, 23 nt, Artificial sequence
  specific aptamers
ggaaggaaugguaugggguaacu

SEQ ID NO: 531 - RNA, 23 nt, Artificial sequence
  specific aptamers
ggaaggaaugguaugggguaagu

SEQ ID NO: 532 - RNA, 23 nt, Artificial sequence
  specific aptamers
ggaaggaaugguaugggguaauu

SEQ ID NO: 533 - RNA, 22 nt, Artificial sequence
  specific aptamers
ggaaggaaugguaugggguaau

SEQ ID NO: 534 - RNA, 23 nt, Artificial sequence
  specific aptamers
ggaaggaaugguaugggguacau

SEQ ID NO: 535 - RNA, 23 nt, Artificial sequence
  specific aptamers
ggaaggaaugguaugggguaccu

SEQ ID NO: 536 - RNA, 23 nt, Artificial sequence
  specific aptamers
ggaaggaaugguaugggguacgu

SEQ ID NO: 537 - RNA, 23 nt, Artificial sequence
  specific aptamers
ggaaggaaugguaugggguacuu

SEQ ID NO: 538 - RNA, 22 nt, Artificial sequence
  specific aptamers
ggaaggaaugguaugggguacu

SEQ ID NO: 539 - RNA, 23 nt, Artificial sequence
  specific aptamers
ggaaggaaugguaugggguagau

SEQ ID NO: 540 - RNA, 23 nt, Artificial sequence
  specific aptamers
ggaaggaaugguaugggguagcu

SEQ ID NO: 541 - RNA, 23 nt, Artificial sequence
  specific aptamers
ggaaggaaugguaugggguaggu

SEQ ID NO: 542 - RNA, 23 nt, Artificial sequence
  specific aptamers
ggaaggaaugguaugggguaguu

SEQ ID NO: 543 - RNA, 22 nt, Artificial sequence
  specific aptamers
ggaaggaaugguaugggguagu

SEQ ID NO: 544 - RNA, 23 nt, Artificial sequence
  specific aptamers
ggaaggaaugguaugggguauau

SEQ ID NO: 545 - RNA, 23 nt, Artificial sequence
  specific aptamers
ggaaggaaugguaugggguaucu

SEQ ID NO: 546 - RNA, 23 nt, Artificial sequence
  specific aptamers
ggaaggaaugguaugggguaugu

SEQ ID NO: 547 - RNA, 23 nt, Artificial sequence
  specific aptamers
ggaaggaaugguaugggguauuu

SEQ ID NO: 548 - RNA, 22 nt, Artificial sequence
  specific aptamers
ggaaggaaugguaugggguauu

SEQ ID NO: 549 - RNA, 23 nt, Artificial sequence
  specific aptamers
ggaaggauuggaaugggguaaau

SEQ ID NO: 550 - RNA, 23 nt, Artificial sequence
  specific aptamers
ggaaggauuggaaugggguaacu

SEQ ID NO: 551 - RNA, 23 nt, Artificial sequence
  specific aptamers
ggaaggauuggaaugggguaagu

SEQ ID NO: 552 - RNA, 23 nt, Artificial sequence
  specific aptamers
ggaaggauuggaaugggguaauu

SEQ ID NO: 553 - RNA, 22 nt, Artificial sequence
  specific aptamers
ggaaggauuggaaugggguaau

SEQ ID NO: 554 - RNA, 23 nt, Artificial sequence
  specific aptamers
ggaaggauuggaaugggguacau

SEQ ID NO: 555 - RNA, 23 nt, Artificial sequence
  specific aptamers
ggaaggauuggaaugggguaccu

SEQ ID NO: 556 - RNA, 23 nt, Artificial sequence
  specific aptamers
ggaaggauuggaaugggguacgu

SEQ ID NO: 557 - RNA, 23 nt, Artificial sequence
  specific aptamers
ggaaggauuggaaugggguacuu

SEQ ID NO: 558 - RNA, 22 nt, Artificial sequence
  specific aptamers
ggaaggauuggaaugggguacu

SEQ ID NO: 559 - RNA, 23 nt, Artificial sequence
  specific aptamers
ggaaggauuggaaugggguagau

SEQ ID NO: 560 - RNA, 23 nt, Artificial sequence
  specific aptamers
ggaaggauuggaaugggguagcu

SEQ ID NO: 561 - RNA, 23 nt, Artificial sequence
  specific aptamers
ggaaggauuggaaugggguaggu

SEQ ID NO: 562 - RNA, 23 nt, Artificial sequence
  specific aptamers
ggaaggauuggaaugggguaguu

SEQ ID NO: 563 - RNA, 22 nt, Artificial sequence
  specific aptamers
ggaaggauuggaaugggguagu

SEQ ID NO: 564 - RNA, 23 nt, Artificial sequence
  specific aptamers
ggaaggauuggaaugggguauau

SEQ ID NO: 565 - RNA, 23 nt, Artificial sequence
  specific aptamers
ggaaggauuggaaugggguaucu

SEQ ID NO: 566 - RNA, 23 nt, Artificial sequence
  specific aptamers
ggaaggauuggaaugggguaugu

SEQ ID NO: 567 - RNA, 23 nt, Artificial sequence
  specific aptamers
ggaaggauuggaaugggguauuu

SEQ ID NO: 568 - RNA, 22 nt, Artificial sequence
  specific aptamers
ggaaggauuggaaugggguauu

SEQ ID NO: 569 - RNA, 23 nt, Artificial sequence
  specific aptamers
ggaaggauuggcaugggguaaau

SEQ ID NO: 570 - RNA, 23 nt, Artificial sequence
  specific aptamers
ggaaggauuggcaugggguaacu

SEQ ID NO: 571 - RNA, 23 nt, Artificial sequence
  specific aptamers
ggaaggauuggcaugggguaagu

SEQ ID NO: 572 - RNA, 23 nt, Artificial sequence
  specific aptamers
ggaaggauuggcaugggguaauu

SEQ ID NO: 573 - RNA, 22 nt, Artificial sequence
  specific aptamers
ggaaggauuggcaugggguaau

SEQ ID NO: 574 - RNA, 23 nt, Artificial sequence
  specific aptamers
ggaaggauuggcaugggguacau

SEQ ID NO: 575 - RNA, 23 nt, Artificial sequence
  specific aptamers
ggaaggauuggcaugggguaccu

SEQ ID NO: 576 - RNA, 23 nt, Artificial sequence
  specific aptamers
ggaaggauuggcaugggguacgu

SEQ ID NO: 577 - RNA, 23 nt, Artificial sequence
  specific aptamers
ggaaggauuggcaugggguacuu

SEQ ID NO: 578 - RNA, 22 nt, Artificial sequence
  specific aptamers
ggaaggauuggcaugggguacu

SEQ ID NO: 579 - RNA, 23 nt, Artificial sequence
  specific aptamers
ggaaggauuggcaugggguagau

SEQ ID NO: 580 - RNA, 23 nt, Artificial sequence
  specific aptamers
ggaaggauuggcaugggguagcu

SEQ ID NO: 581 - RNA, 23 nt, Artificial sequence
  specific aptamers
ggaaggauuggcaugggguaggu

SEQ ID NO: 582 - RNA, 23 nt, Artificial sequence
  specific aptamers
ggaaggauuggcaugggguaguu

SEQ ID NO: 583 - RNA, 22 nt, Artificial sequence
  specific aptamers
ggaaggauuggcaugggguagu

SEQ ID NO: 584 - RNA, 23 nt, Artificial sequence
  specific aptamers
ggaaggauuggcaugggguauau

SEQ ID NO: 585 - RNA, 23 nt, Artificial sequence
  specific aptamers
ggaaggauuggcaugggguaucu

SEQ ID NO: 586 - RNA, 23 nt, Artificial sequence
  specific aptamers
ggaaggauuggcaugggguaugu

SEQ ID NO: 587 - RNA, 23 nt, Artificial sequence
  specific aptamers
ggaaggauuggcaugggguauuu

SEQ ID NO: 588 - RNA, 22 nt, Artificial sequence
  specific aptamers
ggaaggauuggcaugggguauu

SEQ ID NO: 589 - RNA, 23 nt, Artificial sequence
  specific aptamers
ggaaggauugguaugggguaaau

SEQ ID NO: 590 - RNA, 23 nt, Artificial sequence
  specific aptamers
ggaaggauugguaugggguaacu

SEQ ID NO: 591 - RNA, 23 nt, Artificial sequence
  specific aptamers
ggaaggauugguaugggguaagu

SEQ ID NO: 592 - RNA, 23 nt, Artificial sequence
  specific aptamers
ggaaggauugguaugggguaauu

SEQ ID NO: 593 - RNA, 22 nt, Artificial sequence
  specific aptamers
ggaaggauugguaugggguaau

SEQ ID NO: 594 - RNA, 23 nt, Artificial sequence
  specific aptamers
ggaaggauugguaugggguacau

SEQ ID NO: 595 - RNA, 23 nt, Artificial sequence
  specific aptamers
ggaaggauugguaugggguaccu

SEQ ID NO: 596 - RNA, 23 nt, Artificial sequence
  specific aptamers
ggaaggauugguaugggguacgu

SEQ ID NO: 597 - RNA, 23 nt, Artificial sequence
  specific aptamers
ggaaggauugguaugggguacuu

SEQ ID NO: 598 - RNA, 22 nt, Artificial sequence
  specific aptamers
ggaaggauugguaugggguacu

SEQ ID NO: 599 - RNA, 23 nt, Artificial sequence
  specific aptamers
ggaaggauugguaugggguagau

SEQ ID NO: 600 - RNA, 23 nt, Artificial sequence
  specific aptamers
ggaaggauugguaugggguagcu

SEQ ID NO: 601 - RNA, 23 nt, Artificial sequence
  specific aptamers
ggaaggauugguaugggguaggu

SEQ ID NO: 602 - RNA, 23 nt, Artificial sequence
  specific aptamers
ggaaggauugguaugggguaguu

SEQ ID NO: 603 - RNA, 22 nt, Artificial sequence
  specific aptamers
ggaaggauugguaugggguagu

SEQ ID NO: 604 - RNA, 23 nt, Artificial sequence
  specific aptamers
ggaaggauugguaugggguauau

SEQ ID NO: 605 - RNA, 23 nt, Artificial sequence
  specific aptamers
ggaaggauugguaugggguaucu

SEQ ID NO: 606 - RNA, 23 nt, Artificial sequence
  specific aptamers
ggaaggauugguaugggguaugu

SEQ ID NO: 607 - RNA, 23 nt, Artificial sequence
  specific aptamers
ggaaggauugguaugggguauuu

SEQ ID NO: 608 - RNA, 22 nt, Artificial sequence
  specific aptamers
ggaaggauugguaugggguauu

SEQ ID NO: 609 - RNA, 23 nt, Artificial sequence
  specific aptamers
gguaggaauggaaugggguaaau

SEQ ID NO: 610 - RNA, 23 nt, Artificial sequence
  specific aptamers
gguaggaauggaaugggguaacu

SEQ ID NO: 611 - RNA, 23 nt, Artificial sequence
  specific aptamers
gguaggaauggaaugggguaagu

SEQ ID NO: 612 - RNA, 23 nt, Artificial sequence
  specific aptamers
gguaggaauggaaugggguaauu

SEQ ID NO: 613 - RNA, 22 nt, Artificial sequence
  specific aptamers
gguaggaauggaaugggguaau

SEQ ID NO: 614 - RNA, 23 nt, Artificial sequence
  specific aptamers
gguaggaauggaaugggguacau

SEQ ID NO: 615 - RNA, 23 nt, Artificial sequence
  specific aptamers
gguaggaauggaaugggguaccu

SEQ ID NO: 616 - RNA, 23 nt, Artificial sequence
  specific aptamers
gguaggaauggaaugggguacgu

SEQ ID NO: 617 - RNA, 23 nt, Artificial sequence
  specific aptamers
gguaggaauggaaugggguacuu

SEQ ID NO: 618 - RNA, 22 nt, Artificial sequence
  specific aptamers
gguaggaauggaaugggguacu

SEQ ID NO: 619 - RNA, 23 nt, Artificial sequence
  specific aptamers
gguaggaauggaaugggguagau

SEQ ID NO: 620 - RNA, 23 nt, Artificial sequence
  specific aptamers
gguaggaauggaaugggguagcu

SEQ ID NO: 621 - RNA, 23 nt, Artificial sequence
  specific aptamers
gguaggaauggaaugggguaggu

SEQ ID NO: 622 - RNA, 23 nt, Artificial sequence
  specific aptamers
gguaggaauggaaugggguaguu

SEQ ID NO: 623 - RNA, 22 nt, Artificial sequence
  specific aptamers
gguaggaauggaaugggguagu

SEQ ID NO: 624 - RNA, 23 nt, Artificial sequence
  specific aptamers
gguaggaauggaaugggguauau

SEQ ID NO: 625 - RNA, 23 nt, Artificial sequence
  specific aptamers
gguaggaauggaaugggguaucu

SEQ ID NO: 626 - RNA, 23 nt, Artificial sequence
  specific aptamers
gguaggaauggaaugggguaugu

SEQ ID NO: 627 - RNA, 23 nt, Artificial sequence
  specific aptamers
gguaggaauggaaugggguauuu

SEQ ID NO: 628 - RNA, 22 nt, Artificial sequence
  specific aptamers
gguaggaauggaaugggguauu

SEQ ID NO: 629 - RNA, 23 nt, Artificial sequence
  specific aptamers
gguaggaauggcaugggguaaau

SEQ ID NO: 630 - RNA, 23 nt, Artificial sequence
  specific aptamers
gguaggaauggcaugggguaacu

SEQ ID NO: 631 - RNA, 23 nt, Artificial sequence
  specific aptamers
gguaggaauggcaugggguaagu

SEQ ID NO: 632 - RNA, 23 nt, Artificial sequence
  specific aptamers
gguaggaauggcaugggguaauu

SEQ ID NO: 633 - RNA, 22 nt, Artificial sequence
  specific aptamers
gguaggaauggcaugggguaau

SEQ ID NO: 634 - RNA, 23 nt, Artificial sequence
  specific aptamers
gguaggaauggcaugggguacau

SEQ ID NO: 635 - RNA, 23 nt, Artificial sequence
  specific aptamers
gguaggaauggcaugggguaccu

SEQ ID NO: 636 - RNA, 23 nt, Artificial sequence
  specific aptamers
gguaggaauggcaugggguacgu

SEQ ID NO: 637 - RNA, 23 nt, Artificial sequence
  specific aptamers
gguaggaauggcaugggguacuu

SEQ ID NO: 638 - RNA, 22 nt, Artificial sequence
  specific aptamers
gguaggaauggcaugggguacu

SEQ ID NO: 639 - RNA, 23 nt, Artificial sequence
  specific aptamers
gguaggaauggcaugggguagau

SEQ ID NO: 640 - RNA, 23 nt, Artificial sequence
  specific aptamers
gguaggaauggcaugggguagcu

SEQ ID NO: 641 - RNA, 23 nt, Artificial sequence
  specific aptamers
gguaggaauggcaugggguaggu

SEQ ID NO: 642 - RNA, 23 nt, Artificial sequence
  specific aptamers
gguaggaauggcaugggguaguu

SEQ ID NO: 643 - RNA, 22 nt, Artificial sequence
  specific aptamers
gguaggaauggcaugggguagu

SEQ ID NO: 644 - RNA, 23 nt, Artificial sequence
  specific aptamers
gguaggaauggcaugggguauau

SEQ ID NO: 645 - RNA, 23 nt, Artificial sequence
  specific aptamers
gguaggaauggcaugggguaucu

SEQ ID NO: 646 - RNA, 23 nt, Artificial sequence
  specific aptamers
gguaggaauggcaugggguaugu

SEQ ID NO: 647 - RNA, 23 nt, Artificial sequence
  specific aptamers
gguaggaauggcaugggguauuu

SEQ ID NO: 648 - RNA, 22 nt, Artificial sequence
  specific aptamers
gguaggaauggcaugggguauu

SEQ ID NO: 649 - RNA, 23 nt, Artificial sequence
  specific aptamers
gguaggaaugguaugggguaaau

SEQ ID NO: 650 - RNA, 23 nt, Artificial sequence
  specific aptamers
gguaggaaugguaugggguaacu

SEQ ID NO: 651 - RNA, 23 nt, Artificial sequence
  specific aptamers
gguaggaaugguaugggguaagu

SEQ ID NO: 652 - RNA, 23 nt, Artificial sequence
  specific aptamers
gguaggaaugguaugggguaauu

SEQ ID NO: 653 - RNA, 22 nt, Artificial sequence
  specific aptamers
gguaggaaugguaugggguaau

SEQ ID NO: 654 - RNA, 23 nt, Artificial sequence
  specific aptamers
gguaggaaugguaugggguacau

SEQ ID NO: 655 - RNA, 23 nt, Artificial sequence
  specific aptamers
gguaggaaugguaugggguaccu

SEQ ID NO: 656 - RNA, 23 nt, Artificial sequence
  specific aptamers
gguaggaaugguaugggguacgu

SEQ ID NO: 657 - RNA, 23 nt, Artificial sequence
  specific aptamers
gguaggaaugguaugggguacuu

SEQ ID NO: 658 - RNA, 22 nt, Artificial sequence
  specific aptamers
gguaggaaugguaugggguacu

SEQ ID NO: 659 - RNA, 23 nt, Artificial sequence
  specific aptamers
gguaggaaugguaugggguagau

SEQ ID NO: 660 - RNA, 23 nt, Artificial sequence
  specific aptamers
gguaggaaugguaugggguagcu

SEQ ID NO: 661 - RNA, 23 nt, Artificial sequence
  specific aptamers
gguaggaaugguaugggguaggu

SEQ ID NO: 662 - RNA, 23 nt, Artificial sequence
  specific aptamers
gguaggaaugguaugggguaguu

SEQ ID NO: 663 - RNA, 22 nt, Artificial sequence
  specific aptamers
gguaggaaugguaugggguagu

SEQ ID NO: 664 - RNA, 23 nt, Artificial sequence
  specific aptamers
gguaggaaugguaugggguauau

SEQ ID NO: 665 - RNA, 23 nt, Artificial sequence
  specific aptamers
gguaggaaugguaugggguaucu

SEQ ID NO: 666 - RNA, 23 nt, Artificial sequence
  specific aptamers
gguaggaaugguaugggguaugu

SEQ ID NO: 667 - RNA, 23 nt, Artificial sequence
  specific aptamers
gguaggaaugguaugggguauuu

SEQ ID NO: 668 - RNA, 22 nt, Artificial sequence
  specific aptamers
gguaggaaugguaugggguauu

SEQ ID NO: 669 - RNA, 23 nt, Artificial sequence
  specific aptamers
gguaggauuggaaugggguaaau

SEQ ID NO: 670 - RNA, 23 nt, Artificial sequence
  specific aptamers
gguaggauuggaaugggguaacu

SEQ ID NO: 671 - RNA, 23 nt, Artificial sequence
  specific aptamers
gguaggauuggaaugggguaagu

SEQ ID NO: 672 - RNA, 23 nt, Artificial sequence
  specific aptamers
gguaggauuggaaugggguaauu

SEQ ID NO: 673 - RNA, 22 nt, Artificial sequence
  specific aptamers
gguaggauuggaaugggguaau

SEQ ID NO: 674 - RNA, 23 nt, Artificial sequence
  specific aptamers
gguaggauuggaaugggguacau

SEQ ID NO: 675 - RNA, 23 nt, Artificial sequence
  specific aptamers
gguaggauuggaaugggguaccu

SEQ ID NO: 676 - RNA, 23 nt, Artificial sequence
  specific aptamers
gguaggauuggaaugggguacgu

SEQ ID NO: 677 - RNA, 23 nt, Artificial sequence
  specific aptamers
gguaggauuggaaugggguacuu

SEQ ID NO: 678 - RNA, 22 nt, Artificial sequence
  specific aptamers
gguaggauuggaaugggguacu

SEQ ID NO: 679 - RNA, 23 nt, Artificial sequence
  specific aptamers
gguaggauuggaaugggguagau

SEQ ID NO: 680 - RNA, 23 nt, Artificial sequence
  specific aptamers
gguaggauuggaaugggguagcu

SEQ ID NO: 681 - RNA, 23 nt, Artificial sequence
  specific aptamers
gguaggauuggaaugggguaggu

SEQ ID NO: 682 - RNA, 23 nt, Artificial sequence
  specific aptamers
gguaggauuggaaugggguaguu

SEQ ID NO: 683 - RNA, 22 nt, Artificial sequence
  specific aptamers
gguaggauuggaaugggguagu

SEQ ID NO: 684 - RNA, 23 nt, Artificial sequence
  specific aptamers
gguaggauuggaaugggguauau

SEQ ID NO: 685 - RNA, 23 nt, Artificial sequence
  specific aptamers
gguaggauuggaaugggguaucu

SEQ ID NO: 686 - RNA, 23 nt, Artificial sequence
  specific aptamers
gguaggauuggaaugggguaugu

SEQ ID NO: 687 - RNA, 23 nt, Artificial sequence
  specific aptamers
gguaggauuggaaugggguauuu

SEQ ID NO: 688 - RNA, 22 nt, Artificial sequence
  specific aptamers
gguaggauuggaaugggguauu

SEQ ID NO: 689 - RNA, 23 nt, Artificial sequence
  specific aptamers
gguaggauuggcaugggguaaau

SEQ ID NO: 690 - RNA, 23 nt, Artificial sequence
  specific aptamers
gguaggauuggcaugggguaacu

SEQ ID NO: 691 - RNA, 23 nt, Artificial sequence
  specific aptamers
gguaggauuggcaugggguaagu

SEQ ID NO: 692 - RNA, 23 nt, Artificial sequence
  specific aptamers
gguaggauuggcaugggguaauu

SEQ ID NO: 693 - RNA, 22 nt, Artificial sequence
  specific aptamers
gguaggauuggcaugggguaau

SEQ ID NO: 694 - RNA, 23 nt, Artificial sequence
  specific aptamers
gguaggauuggcaugggguacau

SEQ ID NO: 695 - RNA, 23 nt, Artificial sequence
  specific aptamers
gguaggauuggcaugggguaccu

SEQ ID NO: 696 - RNA, 23 nt, Artificial sequence
  specific aptamers
gguaggauuggcaugggguacgu

SEQ ID NO: 697 - RNA, 23 nt, Artificial sequence
  specific aptamers
gguaggauuggcaugggguacuu

SEQ ID NO: 698 - RNA, 22 nt, Artificial sequence
  specific aptamers
gguaggauuggcaugggguacu

SEQ ID NO: 699 - RNA, 23 nt, Artificial sequence
  specific aptamers
gguaggauuggcaugggguagau

SEQ ID NO: 700 - RNA, 23 nt, Artificial sequence
  specific aptamers
gguaggauuggcaugggguagcu

SEQ ID NO: 701 - RNA, 23 nt, Artificial sequence
  specific aptamers
gguaggauuggcaugggguaggu

SEQ ID NO: 702 - RNA, 23 nt, Artificial sequence
  specific aptamers
gguaggauuggcaugggguaguu

SEQ ID NO: 703 - RNA, 22 nt, Artificial sequence
  specific aptamers
gguaggauuggcaugggguagu

SEQ ID NO: 704 - RNA, 23 nt, Artificial sequence
  specific aptamers
gguaggauuggcaugggguauau

SEQ ID NO: 705 - RNA, 23 nt, Artificial sequence
  specific aptamers
gguaggauuggcaugggguaucu

SEQ ID NO: 706 - RNA, 23 nt, Artificial sequence
  specific aptamers
gguaggauuggcaugggguaugu

SEQ ID NO: 707 - RNA, 23 nt, Artificial sequence
  specific aptamers
gguaggauuggcaugggguauuu

SEQ ID NO: 708 - RNA, 22 nt, Artificial sequence
  specific aptamers
gguaggauuggcaugggguauu

SEQ ID NO: 709 - RNA, 23 nt, Artificial sequence
  specific aptamers
gguaggauugguaugggguaaau

SEQ ID NO: 710 - RNA, 23 nt, Artificial sequence
  specific aptamers
gguaggauugguaugggguaacu

SEQ ID NO: 711 - RNA, 23 nt, Artificial sequence
  specific aptamers
gguaggauugguaugggguaagu

SEQ ID NO: 712 - RNA, 23 nt, Artificial sequence
  specific aptamers
gguaggauugguaugggguaauu

SEQ ID NO: 713 - RNA, 22 nt, Artificial sequence
  specific aptamers
gguaggauugguaugggguaau

SEQ ID NO: 714 - RNA, 23 nt, Artificial sequence
  specific aptamers
gguaggauugguaugggguacau

SEQ ID NO: 715 - RNA, 23 nt, Artificial sequence
  specific aptamers
gguaggauugguaugggguaccu

SEQ ID NO: 716 - RNA, 23 nt, Artificial sequence
  specific aptamers
gguaggauugguaugggguacgu

SEQ ID NO: 717 - RNA, 23 nt, Artificial sequence
  specific aptamers
gguaggauugguaugggguacuu

SEQ ID NO: 718 - RNA, 22 nt, Artificial sequence
  specific aptamers
gguaggauugguaugggguacu

SEQ ID NO: 719 - RNA, 23 nt, Artificial sequence
  specific aptamers
gguaggauugguaugggguagau

SEQ ID NO: 720 - RNA, 23 nt, Artificial sequence
  specific aptamers
gguaggauugguaugggguagcu

SEQ ID NO: 721 - RNA, 23 nt, Artificial sequence
  specific aptamers
gguaggauugguaugggguaggu

SEQ ID NO: 722 - RNA, 23 nt, Artificial sequence
  specific aptamers
gguaggauugguaugggguaguu

SEQ ID NO: 723 - RNA, 22 nt, Artificial sequence
  specific aptamers
gguaggauugguaugggguagu

SEQ ID NO: 724 - RNA, 23 nt, Artificial sequence
  specific aptamers
gguaggauugguaugggguauau

SEQ ID NO: 725 - RNA, 23 nt, Artificial sequence
  specific aptamers
gguaggauugguaugggguaucu

SEQ ID NO: 726 - RNA, 23 nt, Artificial sequence
  specific aptamers
gguaggauugguaugggguaugu

SEQ ID NO: 727 - RNA, 23 nt, Artificial sequence
  specific aptamers
gguaggauugguaugggguauuu

SEQ ID NO: 728 - RNA, 22 nt, Artificial sequence
  specific aptamers
gguaggauugguaugggguauu

SEQ ID NO: 729 - RNA, 23 nt, Artificial sequence
  specific aptamers
ggacggaauggaaugugguaaag

SEQ ID NO: 730 - RNA, 23 nt, Artificial sequence
  specific aptamers
ggacggaauggaaugugguaacg

SEQ ID NO: 731 - RNA, 23 nt, Artificial sequence
  specific aptamers
ggacggaauggaaugugguaagg

SEQ ID NO: 732 - RNA, 23 nt, Artificial sequence
  specific aptamers
ggacggaauggaaugugguaaug

SEQ ID NO: 733 - RNA, 22 nt, Artificial sequence
  specific aptamers
ggacggaauggaaugugguaag

SEQ ID NO: 734 - RNA, 23 nt, Artificial sequence
  specific aptamers
ggacggaauggaaugugguacag

SEQ ID NO: 735 - RNA, 23 nt, Artificial sequence
  specific aptamers
ggacggaauggaaugugguaccg

SEQ ID NO: 736 - RNA, 23 nt, Artificial sequence
  specific aptamers
ggacggaauggaaugugguacgg

SEQ ID NO: 737 - RNA, 23 nt, Artificial sequence
  specific aptamers
ggacggaauggaaugugguacug

SEQ ID NO: 738 - RNA, 22 nt, Artificial sequence
  specific aptamers
ggacggaauggaaugugguacg

SEQ ID NO: 739 - RNA, 23 nt, Artificial sequence
  specific aptamers
ggacggaauggaaugugguagag

SEQ ID NO: 740 - RNA, 23 nt, Artificial sequence
  specific aptamers
ggacggaauggaaugugguagcg

SEQ ID NO: 741 - RNA, 23 nt, Artificial sequence
  specific aptamers
ggacggaauggaaugugguaggg

SEQ ID NO: 742 - RNA, 23 nt, Artificial sequence
  specific aptamers
ggacggaauggaaugugguagug

SEQ ID NO: 743 - RNA, 22 nt, Artificial sequence
  specific aptamers
ggacggaauggaaugugguagg

SEQ ID NO: 744 - RNA, 23 nt, Artificial sequence
  specific aptamers
ggacggaauggaaugugguauag

SEQ ID NO: 745 - RNA, 23 nt, Artificial sequence
  specific aptamers
ggacggaauggaaugugguaucg

SEQ ID NO: 746 - RNA, 23 nt, Artificial sequence
  specific aptamers
ggacggaauggaaugugguaugg

SEQ ID NO: 747 - RNA, 23 nt, Artificial sequence
  specific aptamers
ggacggaauggaaugugguauug

SEQ ID NO: 748 - RNA, 22 nt, Artificial sequence
  specific aptamers
ggacggaauggaaugugguaug

SEQ ID NO: 749 - RNA, 23 nt, Artificial sequence
  specific aptamers
ggacggaauggcaugugguaaag

SEQ ID NO: 750 - RNA, 23 nt, Artificial sequence
  specific aptamers
ggacggaauggcaugugguaacg

SEQ ID NO: 751 - RNA, 23 nt, Artificial sequence
  specific aptamers
ggacggaauggcaugugguaagg

SEQ ID NO: 752 - RNA, 23 nt, Artificial sequence
  specific aptamers
ggacggaauggcaugugguaaug

SEQ ID NO: 753 - RNA, 22 nt, Artificial sequence
  specific aptamers
ggacggaauggcaugugguaag

SEQ ID NO: 754 - RNA, 23 nt, Artificial sequence
  specific aptamers
ggacggaauggcaugugguacag

SEQ ID NO: 755 - RNA, 23 nt, Artificial sequence
  specific aptamers
ggacggaauggcaugugguaccg

SEQ ID NO: 756 - RNA, 23 nt, Artificial sequence
  specific aptamers
ggacggaauggcaugugguacgg

SEQ ID NO: 757 - RNA, 23 nt, Artificial sequence
  specific aptamers
ggacggaauggcaugugguacug

SEQ ID NO: 758 - RNA, 22 nt, Artificial sequence
  specific aptamers
ggacggaauggcaugugguacg

SEQ ID NO: 759 - RNA, 23 nt, Artificial sequence
  specific aptamers
ggacggaauggcaugugguagag

SEQ ID NO: 760 - RNA, 23 nt, Artificial sequence
  specific aptamers
ggacggaauggcaugugguagcg

SEQ ID NO: 761 - RNA, 23 nt, Artificial sequence
  specific aptamers
ggacggaauggcaugugguaggg

SEQ ID NO: 762 - RNA, 23 nt, Artificial sequence
  specific aptamers
ggacggaauggcaugugguagug

SEQ ID NO: 763 - RNA, 22 nt, Artificial sequence
  specific aptamers
ggacggaauggcaugugguagg

SEQ ID NO: 764 - RNA, 23 nt, Artificial sequence
  specific aptamers
ggacggaauggcaugugguauag

SEQ ID NO: 765 - RNA, 23 nt, Artificial sequence
  specific aptamers
ggacggaauggcaugugguaucg

SEQ ID NO: 766 - RNA, 23 nt, Artificial sequence
  specific aptamers
ggacggaauggcaugugguaugg

SEQ ID NO: 767 - RNA, 23 nt, Artificial sequence
  specific aptamers
ggacggaauggcaugugguauug

SEQ ID NO: 768 - RNA, 22 nt, Artificial sequence
  specific aptamers
ggacggaauggcaugugguaug

SEQ ID NO: 769 - RNA, 23 nt, Artificial sequence
  specific aptamers
ggacggaaugguaugugguaaag

SEQ ID NO: 770 - RNA, 23 nt, Artificial sequence
  specific aptamers
ggacggaaugguaugugguaacg

SEQ ID NO: 771 - RNA, 23 nt, Artificial sequence
  specific aptamers
ggacggaaugguaugugguaagg

SEQ ID NO: 772 - RNA, 23 nt, Artificial sequence
  specific aptamers
ggacggaaugguaugugguaaug

SEQ ID NO: 773 - RNA, 22 nt, Artificial sequence
  specific aptamers
ggacggaaugguaugugguaag

SEQ ID NO: 774 - RNA, 23 nt, Artificial sequence
  specific aptamers
ggacggaaugguaugugguacag

SEQ ID NO: 775 - RNA, 23 nt, Artificial sequence
  specific aptamers
ggacggaaugguaugugguaccg

SEQ ID NO: 776 - RNA, 23 nt, Artificial sequence
  specific aptamers
ggacggaaugguaugugguacgg

SEQ ID NO: 777 - RNA, 23 nt, Artificial sequence
  specific aptamers
ggacggaaugguaugugguacug

SEQ ID NO: 778 - RNA, 22 nt, Artificial sequence
  specific aptamers
ggacggaaugguaugugguacg

SEQ ID NO: 779 - RNA, 23 nt, Artificial sequence
  specific aptamers
ggacggaaugguaugugguagag

SEQ ID NO: 780 - RNA, 23 nt, Artificial sequence
  specific aptamers
ggacggaaugguaugugguagcg

SEQ ID NO: 781 - RNA, 23 nt, Artificial sequence
  specific aptamers
ggacggaaugguaugugguaggg

SEQ ID NO: 782 - RNA, 23 nt, Artificial sequence
  specific aptamers
ggacggaaugguaugugguagug

SEQ ID NO: 783 - RNA, 22 nt, Artificial sequence
  specific aptamers
ggacggaaugguaugugguagg

SEQ ID NO: 784 - RNA, 23 nt, Artificial sequence
  specific aptamers
ggacggaaugguaugugguauag

SEQ ID NO: 785 - RNA, 23 nt, Artificial sequence
  specific aptamers
ggacggaaugguaugugguaucg

SEQ ID NO: 786 - RNA, 23 nt, Artificial sequence
  specific aptamers
ggacggaaugguaugugguaugg

SEQ ID NO: 787 - RNA, 23 nt, Artificial sequence
  specific aptamers
ggacggaaugguaugugguauug

SEQ ID NO: 788 - RNA, 22 nt, Artificial sequence
  specific aptamers
ggacggaaugguaugugguaug

SEQ ID NO: 789 - RNA, 23 nt, Artificial sequence
  specific aptamers
ggacggauuggaaugugguaaag

SEQ ID NO: 790 - RNA, 23 nt, Artificial sequence
  specific aptamers
ggacggauuggaaugugguaacg

SEQ ID NO: 791 - RNA, 23 nt, Artificial sequence
  specific aptamers
ggacggauuggaaugugguaagg

SEQ ID NO: 792 - RNA, 23 nt, Artificial sequence
  specific aptamers
ggacggauuggaaugugguaaug

SEQ ID NO: 793 - RNA, 22 nt, Artificial sequence
  specific aptamers
ggacggauuggaaugugguaag

SEQ ID NO: 794 - RNA, 23 nt, Artificial sequence
  specific aptamers
ggacggauuggaaugugguacag

SEQ ID NO: 795 - RNA, 23 nt, Artificial sequence
  specific aptamers
ggacggauuggaaugugguaccg

SEQ ID NO: 796 - RNA, 23 nt, Artificial sequence
  specific aptamers
ggacggauuggaaugugguacgg

SEQ ID NO: 797 - RNA, 23 nt, Artificial sequence
  specific aptamers
ggacggauuggaaugugguacug

SEQ ID NO: 798 - RNA, 22 nt, Artificial sequence
  specific aptamers
ggacggauuggaaugugguacg

SEQ ID NO: 799 - RNA, 23 nt, Artificial sequence
  specific aptamers
ggacggauuggaaugugguagag

SEQ ID NO: 800 - RNA, 23 nt, Artificial sequence
  specific aptamers
ggacggauuggaaugugguagcg

SEQ ID NO: 801 - RNA, 23 nt, Artificial sequence
  specific aptamers
ggacggauuggaaugugguaggg

SEQ ID NO: 802 - RNA, 23 nt, Artificial sequence
  specific aptamers
ggacggauuggaaugugguagug

SEQ ID NO: 803 - RNA, 22 nt, Artificial sequence
  specific aptamers
ggacggauuggaaugugguagg

SEQ ID NO: 804 - RNA, 23 nt, Artificial sequence
  specific aptamers
ggacggauuggaaugugguauag

SEQ ID NO: 805 - RNA, 23 nt, Artificial sequence
  specific aptamers
ggacggauuggaaugugguaucg

SEQ ID NO: 806 - RNA, 23 nt, Artificial sequence
  specific aptamers
ggacggauuggaaugugguaugg

SEQ ID NO: 807 - RNA, 23 nt, Artificial sequence
  specific aptamers
ggacggauuggaaugugguauug

SEQ ID NO: 808 - RNA, 22 nt, Artificial sequence
  specific aptamers
ggacggauuggaaugugguaug

SEQ ID NO: 809 - RNA, 23 nt, Artificial sequence
  specific aptamers
ggacggauuggcaugugguaaag

SEQ ID NO: 810 - RNA, 23 nt, Artificial sequence
  specific aptamers
ggacggauuggcaugugguaacg

SEQ ID NO: 811 - RNA, 23 nt, Artificial sequence
  specific aptamers
ggacggauuggcaugugguaagg

SEQ ID NO: 812 - RNA, 23 nt, Artificial sequence
  specific aptamers
ggacggauuggcaugugguaaug

SEQ ID NO: 813 - RNA, 22 nt, Artificial sequence
  specific aptamers
ggacggauuggcaugugguaag

SEQ ID NO: 814 - RNA, 23 nt, Artificial sequence
  specific aptamers
ggacggauuggcaugugguacag

SEQ ID NO: 815 - RNA, 23 nt, Artificial sequence
  specific aptamers
ggacggauuggcaugugguaccg

SEQ ID NO: 816 - RNA, 23 nt, Artificial sequence
  specific aptamers
ggacggauuggcaugugguacgg

SEQ ID NO: 817 - RNA, 23 nt, Artificial sequence
  specific aptamers
ggacggauuggcaugugguacug

SEQ ID NO: 818 - RNA, 22 nt, Artificial sequence
  specific aptamers
ggacggauuggcaugugguacg

SEQ ID NO: 819 - RNA, 23 nt, Artificial sequence
  specific aptamers
ggacggauuggcaugugguagag

SEQ ID NO: 820 - RNA, 23 nt, Artificial sequence
  specific aptamers
ggacggauuggcaugugguagcg

SEQ ID NO: 821 - RNA, 23 nt, Artificial sequence
  specific aptamers
ggacggauuggcaugugguaggg

SEQ ID NO: 822 - RNA, 23 nt, Artificial sequence
  specific aptamers
ggacggauuggcaugugguagug

SEQ ID NO: 823 - RNA, 22 nt, Artificial sequence
  specific aptamers
ggacggauuggcaugugguagg

SEQ ID NO: 824 - RNA, 23 nt, Artificial sequence
  specific aptamers
ggacggauuggcaugugguauag

SEQ ID NO: 825 - RNA, 23 nt, Artificial sequence
  specific aptamers
ggacggauuggcaugugguaucg

SEQ ID NO: 826 - RNA, 23 nt, Artificial sequence
  specific aptamers
ggacggauuggcaugugguaugg

SEQ ID NO: 827 - RNA, 23 nt, Artificial sequence
  specific aptamers
ggacggauuggcaugugguauug

SEQ ID NO: 828 - RNA, 22 nt, Artificial sequence
  specific aptamers
ggacggauuggcaugugguaug

SEQ ID NO: 829 - RNA, 23 nt, Artificial sequence
  specific aptamers
ggacggauugguaugugguaaag

SEQ ID NO: 830 - RNA, 23 nt, Artificial sequence
  specific aptamers
ggacggauugguaugugguaacg

SEQ ID NO: 831 - RNA, 23 nt, Artificial sequence
  specific aptamers
ggacggauugguaugugguaagg

SEQ ID NO: 832 - RNA, 23 nt, Artificial sequence
  specific aptamers
ggacggauugguaugugguaaug

SEQ ID NO: 833 - RNA, 22 nt, Artificial sequence
  specific aptamers
ggacggauugguaugugguaag

SEQ ID NO: 834 - RNA, 23 nt, Artificial sequence
  specific aptamers
ggacggauugguaugugguacag

SEQ ID NO: 835 - RNA, 23 nt, Artificial sequence
  specific aptamers
ggacggauugguaugugguaccg

SEQ ID NO: 836 - RNA, 23 nt, Artificial sequence
  specific aptamers
ggacggauugguaugugguacgg

SEQ ID NO: 837 - RNA, 23 nt, Artificial sequence
  specific aptamers
ggacggauugguaugugguacug

SEQ ID NO: 838 - RNA, 22 nt, Artificial sequence
  specific aptamers
ggacggauugguaugugguacg

SEQ ID NO: 839 - RNA, 23 nt, Artificial sequence
  specific aptamers
ggacggauugguaugugguagag

SEQ ID NO: 840 - RNA, 23 nt, Artificial sequence
  specific aptamers
ggacggauugguaugugguagcg

SEQ ID NO: 841 - RNA, 23 nt, Artificial sequence
  specific aptamers
ggacggauugguaugugguaggg

SEQ ID NO: 842 - RNA, 23 nt, Artificial sequence
  specific aptamers
ggacggauugguaugugguagug

SEQ ID NO: 843 - RNA, 22 nt, Artificial sequence
  specific aptamers
ggacggauugguaugugguagg

SEQ ID NO: 844 - RNA, 23 nt, Artificial sequence
  specific aptamers
ggacggauugguaugugguauag

SEQ ID NO: 845 - RNA, 23 nt, Artificial sequence
  specific aptamers
ggacggauugguaugugguaucg

SEQ ID NO: 846 - RNA, 23 nt, Artificial sequence
  specific aptamers
ggacggauugguaugugguaugg

SEQ ID NO: 847 - RNA, 23 nt, Artificial sequence
  specific aptamers
ggacggauugguaugugguauug

SEQ ID NO: 848 - RNA, 22 nt, Artificial sequence
  specific aptamers
ggacggauugguaugugguaug

SEQ ID NO: 849 - RNA, 23 nt, Artificial sequence
  specific aptamers
ggucggaauggaaugugguaaag

SEQ ID NO: 850 - RNA, 23 nt, Artificial sequence
  specific aptamers
ggucggaauggaaugugguaacg

SEQ ID NO: 851 - RNA, 23 nt, Artificial sequence
  specific aptamers
ggucggaauggaaugugguaagg

SEQ ID NO: 852 - RNA, 23 nt, Artificial sequence
  specific aptamers
ggucggaauggaaugugguaaug

SEQ ID NO: 853 - RNA, 22 nt, Artificial sequence
  specific aptamers
ggucggaauggaaugugguaag

SEQ ID NO: 854 - RNA, 23 nt, Artificial sequence
  specific aptamers
ggucggaauggaaugugguacag

SEQ ID NO: 855 - RNA, 23 nt, Artificial sequence
  specific aptamers
ggucggaauggaaugugguaccg

SEQ ID NO: 856 - RNA, 23 nt, Artificial sequence
  specific aptamers
ggucggaauggaaugugguacgg

SEQ ID NO: 857 - RNA, 23 nt, Artificial sequence
  specific aptamers
ggucggaauggaaugugguacug

SEQ ID NO: 858 - RNA, 22 nt, Artificial sequence
  specific aptamers
ggucggaauggaaugugguacg

SEQ ID NO: 859 - RNA, 23 nt, Artificial sequence
  specific aptamers
ggucggaauggaaugugguagag

SEQ ID NO: 860 - RNA, 23 nt, Artificial sequence
  specific aptamers
ggucggaauggaaugugguagcg

SEQ ID NO: 861 - RNA, 23 nt, Artificial sequence
  specific aptamers
ggucggaauggaaugugguaggg

SEQ ID NO: 862 - RNA, 23 nt, Artificial sequence
  specific aptamers
ggucggaauggaaugugguagug

SEQ ID NO: 863 - RNA, 22 nt, Artificial sequence
  specific aptamers
ggucggaauggaaugugguagg

SEQ ID NO: 864 - RNA, 23 nt, Artificial sequence
  specific aptamers
ggucggaauggaaugugguauag

SEQ ID NO: 865 - RNA, 23 nt, Artificial sequence
  specific aptamers
ggucggaauggaaugugguaucg

SEQ ID NO: 866 - RNA, 23 nt, Artificial sequence
  specific aptamers
ggucggaauggaaugugguaugg

SEQ ID NO: 867 - RNA, 23 nt, Artificial sequence
  specific aptamers
ggucggaauggaaugugguauug

SEQ ID NO: 868 - RNA, 22 nt, Artificial sequence
  specific aptamers
ggucggaauggaaugugguaug

SEQ ID NO: 869 - RNA, 23 nt, Artificial sequence
  specific aptamers
ggucggaauggcaugugguaaag

SEQ ID NO: 870 - RNA, 23 nt, Artificial sequence
  specific aptamers
ggucggaauggcaugugguaacg

SEQ ID NO: 871 - RNA, 23 nt, Artificial sequence
  specific aptamers
ggucggaauggcaugugguaagg

SEQ ID NO: 872 - RNA, 23 nt, Artificial sequence
  specific aptamers
ggucggaauggcaugugguaaug

SEQ ID NO: 873 - RNA, 22 nt, Artificial sequence
  specific aptamers
ggucggaauggcaugugguaag

SEQ ID NO: 874 - RNA, 23 nt, Artificial sequence
  specific aptamers
ggucggaauggcaugugguacag

SEQ ID NO: 875 - RNA, 23 nt, Artificial sequence
  specific aptamers
ggucggaauggcaugugguaccg

SEQ ID NO: 876 - RNA, 23 nt, Artificial sequence
  specific aptamers
ggucggaauggcaugugguacgg

SEQ ID NO: 877 - RNA, 23 nt, Artificial sequence
  specific aptamers
ggucggaauggcaugugguacug

SEQ ID NO: 878 - RNA, 22 nt, Artificial sequence
  specific aptamers
ggucggaauggcaugugguacg

SEQ ID NO: 879 - RNA, 23 nt, Artificial sequence
  specific aptamers
ggucggaauggcaugugguagag

SEQ ID NO: 880 - RNA, 23 nt, Artificial sequence
  specific aptamers
ggucggaauggcaugugguagcg

SEQ ID NO: 881 - RNA, 23 nt, Artificial sequence
  specific aptamers
ggucggaauggcaugugguaggg

SEQ ID NO: 882 - RNA, 23 nt, Artificial sequence
  specific aptamers
ggucggaauggcaugugguagug

SEQ ID NO: 883 - RNA, 22 nt, Artificial sequence
  specific aptamers
ggucggaauggcaugugguagg

SEQ ID NO: 884 - RNA, 23 nt, Artificial sequence
  specific aptamers
ggucggaauggcaugugguauag

SEQ ID NO: 885 - RNA, 23 nt, Artificial sequence
  specific aptamers
ggucggaauggcaugugguaucg

SEQ ID NO: 886 - RNA, 23 nt, Artificial sequence
  specific aptamers
ggucggaauggcaugugguaugg

SEQ ID NO: 887 - RNA, 23 nt, Artificial sequence
  specific aptamers
ggucggaauggcaugugguauug

SEQ ID NO: 888 - RNA, 22 nt, Artificial sequence
  specific aptamers
ggucggaauggcaugugguaug

SEQ ID NO: 889 - RNA, 23 nt, Artificial sequence
  specific aptamers
ggucggaaugguaugugguaaag

SEQ ID NO: 890 - RNA, 23 nt, Artificial sequence
  specific aptamers
ggucggaaugguaugugguaacg

SEQ ID NO: 891 - RNA, 23 nt, Artificial sequence
  specific aptamers
ggucggaaugguaugugguaagg

SEQ ID NO: 892 - RNA, 23 nt, Artificial sequence
  specific aptamers
ggucggaaugguaugugguaaug

SEQ ID NO: 893 - RNA, 22 nt, Artificial sequence
  specific aptamers
ggucggaaugguaugugguaag

SEQ ID NO: 894 - RNA, 23 nt, Artificial sequence
  specific aptamers
ggucggaaugguaugugguacag

SEQ ID NO: 895 - RNA, 23 nt, Artificial sequence
  specific aptamers
ggucggaaugguaugugguaccg

SEQ ID NO: 896 - RNA, 23 nt, Artificial sequence
  specific aptamers
ggucggaaugguaugugguacgg

SEQ ID NO: 897 - RNA, 23 nt, Artificial sequence
  specific aptamers
ggucggaaugguaugugguacug

SEQ ID NO: 898 - RNA, 22 nt, Artificial sequence
  specific aptamers
ggucggaaugguaugugguacg

SEQ ID NO: 899 - RNA, 23 nt, Artificial sequence
  specific aptamers
ggucggaaugguaugugguagag

SEQ ID NO: 900 - RNA, 23 nt, Artificial sequence
  specific aptamers
ggucggaaugguaugugguagcg

SEQ ID NO: 901 - RNA, 23 nt, Artificial sequence
  specific aptamers
ggucggaaugguaugugguaggg

SEQ ID NO: 902 - RNA, 23 nt, Artificial sequence
  specific aptamers
ggucggaaugguaugugguagug

SEQ ID NO: 903 - RNA, 22 nt, Artificial sequence
  specific aptamers
ggucggaaugguaugugguagg

SEQ ID NO: 904 - RNA, 23 nt, Artificial sequence
  specific aptamers
ggucggaaugguaugugguauag

SEQ ID NO: 905 - RNA, 23 nt, Artificial sequence
  specific aptamers
ggucggaaugguaugugguaucg

SEQ ID NO: 906 - RNA, 23 nt, Artificial sequence
  specific aptamers
ggucggaaugguaugugguaugg

SEQ ID NO: 907 - RNA, 23 nt, Artificial sequence
  specific aptamers
ggucggaaugguaugugguauug

SEQ ID NO: 908 - RNA, 22 nt, Artificial sequence
  specific aptamers
ggucggaaugguaugugguaug

SEQ ID NO: 909 - RNA, 23 nt, Artificial sequence
  specific aptamers
ggucggauuggaaugugguaaag

SEQ ID NO: 910 - RNA, 23 nt, Artificial sequence
  specific aptamers
ggucggauuggaaugugguaacg

SEQ ID NO: 911 - RNA, 23 nt, Artificial sequence
  specific aptamers
ggucggauuggaaugugguaagg

SEQ ID NO: 912 - RNA, 23 nt, Artificial sequence
  specific aptamers
ggucggauuggaaugugguaaug

SEQ ID NO: 913 - RNA, 22 nt, Artificial sequence
  specific aptamers
ggucggauuggaaugugguaag

SEQ ID NO: 914 - RNA, 23 nt, Artificial sequence
  specific aptamers
ggucggauuggaaugugguacag

SEQ ID NO: 915 - RNA, 23 nt, Artificial sequence
  specific aptamers
ggucggauuggaaugugguaccg

SEQ ID NO: 916 - RNA, 23 nt, Artificial sequence
  specific aptamers
ggucggauuggaaugugguacgg

SEQ ID NO: 917 - RNA, 23 nt, Artificial sequence
  specific aptamers
ggucggauuggaaugugguacug

SEQ ID NO: 918 - RNA, 22 nt, Artificial sequence
  specific aptamers
ggucggauuggaaugugguacg

SEQ ID NO: 919 - RNA, 23 nt, Artificial sequence
  specific aptamers
ggucggauuggaaugugguagag

SEQ ID NO: 920 - RNA, 23 nt, Artificial sequence
  specific aptamers
ggucggauuggaaugugguagcg

SEQ ID NO: 921 - RNA, 23 nt, Artificial sequence
  specific aptamers
ggucggauuggaaugugguaggg

SEQ ID NO: 922 - RNA, 23 nt, Artificial sequence
  specific aptamers
ggucggauuggaaugugguagug

SEQ ID NO: 923 - RNA, 22 nt, Artificial sequence
  specific aptamers
ggucggauuggaaugugguagg

SEQ ID NO: 924 - RNA, 23 nt, Artificial sequence
  specific aptamers
ggucggauuggaaugugguauag

SEQ ID NO: 925 - RNA, 23 nt, Artificial sequence
  specific aptamers
ggucggauuggaaugugguaucg

SEQ ID NO: 926 - RNA, 23 nt, Artificial sequence
  specific aptamers
ggucggauuggaaugugguaugg

SEQ ID NO: 927 - RNA, 23 nt, Artificial sequence
  specific aptamers
ggucggauuggaaugugguauug

SEQ ID NO: 928 - RNA, 22 nt, Artificial sequence
  specific aptamers
ggucggauuggaaugugguaug

SEQ ID NO: 929 - RNA, 23 nt, Artificial sequence
  specific aptamers
ggucggauuggcaugugguaaag

SEQ ID NO: 930 - RNA, 23 nt, Artificial sequence
  specific aptamers
ggucggauuggcaugugguaacg

SEQ ID NO: 931 - RNA, 23 nt, Artificial sequence
  specific aptamers
ggucggauuggcaugugguaagg

SEQ ID NO: 932 - RNA, 23 nt, Artificial sequence
  specific aptamers
ggucggauuggcaugugguaaug

SEQ ID NO: 933 - RNA, 22 nt, Artificial sequence
  specific aptamers
ggucggauuggcaugugguaag

SEQ ID NO: 934 - RNA, 23 nt, Artificial sequence
  specific aptamers
ggucggauuggcaugugguacag

SEQ ID NO: 935 - RNA, 23 nt, Artificial sequence
  specific aptamers
ggucggauuggcaugugguaccg

SEQ ID NO: 936 - RNA, 23 nt, Artificial sequence
  specific aptamers
ggucggauuggcaugugguacgg

SEQ ID NO: 937 - RNA, 23 nt, Artificial sequence
  specific aptamers
ggucggauuggcaugugguacug

SEQ ID NO: 938 - RNA, 22 nt, Artificial sequence
  specific aptamers
ggucggauuggcaugugguacg

SEQ ID NO: 939 - RNA, 23 nt, Artificial sequence
  specific aptamers
ggucggauuggcaugugguagag

SEQ ID NO: 940 - RNA, 23 nt, Artificial sequence
  specific aptamers
ggucggauuggcaugugguagcg

SEQ ID NO: 941 - RNA, 23 nt, Artificial sequence
  specific aptamers
ggucggauuggcaugugguaggg

SEQ ID NO: 942 - RNA, 23 nt, Artificial sequence
  specific aptamers
ggucggauuggcaugugguagug

SEQ ID NO: 943 - RNA, 22 nt, Artificial sequence
  specific aptamers
ggucggauuggcaugugguagg

SEQ ID NO: 944 - RNA, 23 nt, Artificial sequence
  specific aptamers
ggucggauuggcaugugguauag

SEQ ID NO: 945 - RNA, 23 nt, Artificial sequence
  specific aptamers
ggucggauuggcaugugguaucg

SEQ ID NO: 946 - RNA, 23 nt, Artificial sequence
  specific aptamers
ggucggauuggcaugugguaugg

SEQ ID NO: 947 - RNA, 23 nt, Artificial sequence
  specific aptamers
ggucggauuggcaugugguauug

SEQ ID NO: 948 - RNA, 22 nt, Artificial sequence
  specific aptamers
ggucggauuggcaugugguaug

SEQ ID NO: 949 - RNA, 23 nt, Artificial sequence
  specific aptamers
ggucggauugguaugugguaaag

SEQ ID NO: 950 - RNA, 23 nt, Artificial sequence
  specific aptamers
ggucggauugguaugugguaacg

SEQ ID NO: 951 - RNA, 23 nt, Artificial sequence
  specific aptamers
ggucggauugguaugugguaagg

SEQ ID NO: 952 - RNA, 23 nt, Artificial sequence
  specific aptamers
ggucggauugguaugugguaaug

SEQ ID NO: 953 - RNA, 22 nt, Artificial sequence
  specific aptamers
ggucggauugguaugugguaag

SEQ ID NO: 954 - RNA, 23 nt, Artificial sequence
  specific aptamers
ggucggauugguaugugguacag

SEQ ID NO: 955 - RNA, 23 nt, Artificial sequence
  specific aptamers
ggucggauugguaugugguaccg

SEQ ID NO: 956 - RNA, 23 nt, Artificial sequence
  specific aptamers
ggucggauugguaugugguacgg

SEQ ID NO: 957 - RNA, 23 nt, Artificial sequence
  specific aptamers
ggucggauugguaugugguacug

SEQ ID NO: 958 - RNA, 22 nt, Artificial sequence
  specific aptamers
ggucggauugguaugugguacg

SEQ ID NO: 959 - RNA, 23 nt, Artificial sequence
  specific aptamers
ggucggauugguaugugguagag

SEQ ID NO: 960 - RNA, 23 nt, Artificial sequence
  specific aptamers
ggucggauugguaugugguagcg

SEQ ID NO: 961 - RNA, 23 nt, Artificial sequence
  specific aptamers
ggucggauugguaugugguaggg

SEQ ID NO: 962 - RNA, 23 nt, Artificial sequence
  specific aptamers
ggucggauugguaugugguagug

SEQ ID NO: 963 - RNA, 22 nt, Artificial sequence
  specific aptamers
ggucggauugguaugugguagg

SEQ ID NO: 964 - RNA, 23 nt, Artificial sequence
  specific aptamers
ggucggauugguaugugguauag

SEQ ID NO: 965 - RNA, 23 nt, Artificial sequence
  specific aptamers
ggucggauugguaugugguaucg

SEQ ID NO: 966 - RNA, 23 nt, Artificial sequence
  specific aptamers
ggucggauugguaugugguaugg

SEQ ID NO: 967 - RNA, 23 nt, Artificial sequence
  specific aptamers
ggucggauugguaugugguauug

SEQ ID NO: 968 - RNA, 22 nt, Artificial sequence
  specific aptamers
ggucggauugguaugugguaug

SEQ ID NO: 969 - RNA, 23 nt, Artificial sequence
  specific aptamers
ggaaggaauggaaugagguaaau

SEQ ID NO: 970 - RNA, 23 nt, Artificial sequence
  specific aptamers
ggaaggaauggaaugagguaacu

SEQ ID NO: 971 - RNA, 23 nt, Artificial sequence
  specific aptamers
ggaaggaauggaaugagguaagu

SEQ ID NO: 972 - RNA, 23 nt, Artificial sequence
  specific aptamers
ggaaggaauggaaugagguaauu

SEQ ID NO: 973 - RNA, 22 nt, Artificial sequence
  specific aptamers
ggaaggaauggaaugagguaau

SEQ ID NO: 974 - RNA, 23 nt, Artificial sequence
  specific aptamers
ggaaggaauggaaugagguacau

SEQ ID NO: 975 - RNA, 23 nt, Artificial sequence
  specific aptamers
ggaaggaauggaaugagguaccu

SEQ ID NO: 976 - RNA, 23 nt, Artificial sequence
  specific aptamers
ggaaggaauggaaugagguacgu

SEQ ID NO: 977 - RNA, 23 nt, Artificial sequence
  specific aptamers
ggaaggaauggaaugagguacuu

SEQ ID NO: 978 - RNA, 22 nt, Artificial sequence
  specific aptamers
ggaaggaauggaaugagguacu

SEQ ID NO: 979 - RNA, 23 nt, Artificial sequence
  specific aptamers
ggaaggaauggaaugagguagau

SEQ ID NO: 980 - RNA, 23 nt, Artificial sequence
  specific aptamers
ggaaggaauggaaugagguagcu

SEQ ID NO: 981 - RNA, 23 nt, Artificial sequence
  specific aptamers
ggaaggaauggaaugagguaggu

SEQ ID NO: 982 - RNA, 23 nt, Artificial sequence
  specific aptamers
ggaaggaauggaaugagguaguu

SEQ ID NO: 983 - RNA, 22 nt, Artificial sequence
  specific aptamers
ggaaggaauggaaugagguagu

SEQ ID NO: 984 - RNA, 23 nt, Artificial sequence
  specific aptamers
ggaaggaauggaaugagguauau

SEQ ID NO: 985 - RNA, 23 nt, Artificial sequence
  specific aptamers
ggaaggaauggaaugagguaucu

SEQ ID NO: 986 - RNA, 23 nt, Artificial sequence
  specific aptamers
ggaaggaauggaaugagguaugu

SEQ ID NO: 987 - RNA, 23 nt, Artificial sequence
  specific aptamers
ggaaggaauggaaugagguauuu

SEQ ID NO: 988 - RNA, 22 nt, Artificial sequence
  specific aptamers
ggaaggaauggaaugagguauu

SEQ ID NO: 989 - RNA, 23 nt, Artificial sequence
  specific aptamers
ggaaggaauggcaugagguaaau

SEQ ID NO: 990 - RNA, 23 nt, Artificial sequence
  specific aptamers
ggaaggaauggcaugagguaacu

SEQ ID NO: 991 - RNA, 23 nt, Artificial sequence
  specific aptamers
ggaaggaauggcaugagguaagu

SEQ ID NO: 992 - RNA, 23 nt, Artificial sequence
  specific aptamers
ggaaggaauggcaugagguaauu

SEQ ID NO: 993 - RNA, 22 nt, Artificial sequence
  specific aptamers
ggaaggaauggcaugagguaau

SEQ ID NO: 994 - RNA, 23 nt, Artificial sequence
  specific aptamers
ggaaggaauggcaugagguacau

SEQ ID NO: 995 - RNA, 23 nt, Artificial sequence
  specific aptamers
ggaaggaauggcaugagguaccu

SEQ ID NO: 996 - RNA, 23 nt, Artificial sequence
  specific aptamers
ggaaggaauggcaugagguacgu

SEQ ID NO: 997 - RNA, 23 nt, Artificial sequence
  specific aptamers
ggaaggaauggcaugagguacuu

SEQ ID NO: 998 - RNA, 22 nt, Artificial sequence
  specific aptamers
ggaaggaauggcaugagguacu

SEQ ID NO: 999 - RNA, 23 nt, Artificial sequence
  specific aptamers
ggaaggaauggcaugagguagau

SEQ ID NO: 1000 - RNA, 23 nt, Artificial sequence
  specific aptamers
ggaaggaauggcaugagguagcu

SEQ ID NO: 1001 - RNA, 23 nt, Artificial sequence
  specific aptamers
ggaaggaauggcaugagguaggu

SEQ ID NO: 1002 - RNA, 23 nt, Artificial sequence
  specific aptamers
ggaaggaauggcaugagguaguu

SEQ ID NO: 1003 - RNA, 22 nt, Artificial sequence
  specific aptamers
ggaaggaauggcaugagguagu

SEQ ID NO: 1004 - RNA, 23 nt, Artificial sequence
  specific aptamers
ggaaggaauggcaugagguauau

SEQ ID NO: 1005 - RNA, 23 nt, Artificial sequence
  specific aptamers
ggaaggaauggcaugagguaucu

SEQ ID NO: 1006 - RNA, 23 nt, Artificial sequence
  specific aptamers
ggaaggaauggcaugagguaugu

SEQ ID NO: 1007 - RNA, 23 nt, Artificial sequence
  specific aptamers
ggaaggaauggcaugagguauuu

SEQ ID NO: 1008 - RNA, 22 nt, Artificial sequence
  specific aptamers
ggaaggaauggcaugagguauu

SEQ ID NO: 1009 - RNA, 23 nt, Artificial sequence
  specific aptamers
ggaaggaaugguaugagguaaau

SEQ ID NO: 1010 - RNA, 23 nt, Artificial sequence
  specific aptamers
ggaaggaaugguaugagguaacu

SEQ ID NO: 1011 - RNA, 23 nt, Artificial sequence
  specific aptamers
ggaaggaaugguaugagguaagu

SEQ ID NO: 1012 - RNA, 23 nt, Artificial sequence
  specific aptamers
ggaaggaaugguaugagguaauu

SEQ ID NO: 1013 - RNA, 22 nt, Artificial sequence
  specific aptamers
ggaaggaaugguaugagguaau

SEQ ID NO: 1014 - RNA, 23 nt, Artificial sequence
  specific aptamers
ggaaggaaugguaugagguacau

SEQ ID NO: 1015 - RNA, 23 nt, Artificial sequence
  specific aptamers
ggaaggaaugguaugagguaccu

SEQ ID NO: 1016 - RNA, 23 nt, Artificial sequence
  specific aptamers
ggaaggaaugguaugagguacgu

SEQ ID NO: 1017 - RNA, 23 nt, Artificial sequence
  specific aptamers
ggaaggaaugguaugagguacuu

SEQ ID NO: 1018 - RNA, 22 nt, Artificial sequence
  specific aptamers
ggaaggaaugguaugagguacu

SEQ ID NO: 1019 - RNA, 23 nt, Artificial sequence
  specific aptamers
ggaaggaaugguaugagguagau

SEQ ID NO: 1020 - RNA, 23 nt, Artificial sequence
  specific aptamers
ggaaggaaugguaugagguagcu

SEQ ID NO: 1021 - RNA, 23 nt, Artificial sequence
  specific aptamers
ggaaggaaugguaugagguaggu

SEQ ID NO: 1022 - RNA, 23 nt, Artificial sequence
  specific aptamers
ggaaggaaugguaugagguaguu

SEQ ID NO: 1023 - RNA, 22 nt, Artificial sequence
  specific aptamers
ggaaggaaugguaugagguagu

SEQ ID NO: 1024 - RNA, 23 nt, Artificial sequence
  specific aptamers
ggaaggaaugguaugagguauau

SEQ ID NO: 1025 - RNA, 23 nt, Artificial sequence
  specific aptamers
ggaaggaaugguaugagguaucu

SEQ ID NO: 1026 - RNA, 23 nt, Artificial sequence
  specific aptamers
ggaaggaaugguaugagguaugu

SEQ ID NO: 1027 - RNA, 23 nt, Artificial sequence
  specific aptamers
ggaaggaaugguaugagguauuu

SEQ ID NO: 1028 - RNA, 22 nt, Artificial sequence
  specific aptamers
ggaaggaaugguaugagguauu

SEQ ID NO: 1029 - RNA, 23 nt, Artificial sequence
  specific aptamers
ggaaggauuggaaugagguaaau

SEQ ID NO: 1030 - RNA, 23 nt, Artificial sequence
  specific aptamers
ggaaggauuggaaugagguaacu

SEQ ID NO: 1031 - RNA, 23 nt, Artificial sequence
  specific aptamers
ggaaggauuggaaugagguaagu

SEQ ID NO: 1032 - RNA, 23 nt, Artificial sequence
  specific aptamers
ggaaggauuggaaugagguaauu

SEQ ID NO: 1033 - RNA, 22 nt, Artificial sequence
  specific aptamers
ggaaggauuggaaugagguaau

SEQ ID NO: 1034 - RNA, 23 nt, Artificial sequence
  specific aptamers
ggaaggauuggaaugagguacau

SEQ ID NO: 1035 - RNA, 23 nt, Artificial sequence
  specific aptamers
ggaaggauuggaaugagguaccu

SEQ ID NO: 1036 - RNA, 23 nt, Artificial sequence
  specific aptamers
ggaaggauuggaaugagguacgu

SEQ ID NO: 1037 - RNA, 23 nt, Artificial sequence
  specific aptamers
ggaaggauuggaaugagguacuu

SEQ ID NO: 1038 - RNA, 22 nt, Artificial sequence
  specific aptamers
ggaaggauuggaaugagguacu

SEQ ID NO: 1039 - RNA, 23 nt, Artificial sequence
  specific aptamers
ggaaggauuggaaugagguagau

SEQ ID NO: 1040 - RNA, 23 nt, Artificial sequence
  specific aptamers
ggaaggauuggaaugagguagcu

SEQ ID NO: 1041 - RNA, 23 nt, Artificial sequence
  specific aptamers
ggaaggauuggaaugagguaggu

SEQ ID NO: 1042 - RNA, 23 nt, Artificial sequence
  specific aptamers
ggaaggauuggaaugagguaguu

SEQ ID NO: 1043 - RNA, 22 nt, Artificial sequence
  specific aptamers
ggaaggauuggaaugagguagu

SEQ ID NO: 1044 - RNA, 23 nt, Artificial sequence
  specific aptamers
ggaaggauuggaaugagguauau

SEQ ID NO: 1045 - RNA, 23 nt, Artificial sequence
  specific aptamers
ggaaggauuggaaugagguaucu

SEQ ID NO: 1046 - RNA, 23 nt, Artificial sequence
  specific aptamers
ggaaggauuggaaugagguaugu

SEQ ID NO: 1047 - RNA, 23 nt, Artificial sequence
  specific aptamers
ggaaggauuggaaugagguauuu

SEQ ID NO: 1048 - RNA, 22 nt, Artificial sequence
  specific aptamers
ggaaggauuggaaugagguauu

SEQ ID NO: 1049 - RNA, 23 nt, Artificial sequence
  specific aptamers
ggaaggauuggcaugagguaaau

SEQ ID NO: 1050 - RNA, 23 nt, Artificial sequence
  specific aptamers
ggaaggauuggcaugagguaacu

SEQ ID NO: 1051 - RNA, 23 nt, Artificial sequence
  specific aptamers
ggaaggauuggcaugagguaagu

SEQ ID NO: 1052 - RNA, 23 nt, Artificial sequence
  specific aptamers
ggaaggauuggcaugagguaauu

SEQ ID NO: 1053 - RNA, 22 nt, Artificial sequence
  specific aptamers
ggaaggauuggcaugagguaau

SEQ ID NO: 1054 - RNA, 23 nt, Artificial sequence
  specific aptamers
ggaaggauuggcaugagguacau

SEQ ID NO: 1055 - RNA, 23 nt, Artificial sequence
  specific aptamers
ggaaggauuggcaugagguaccu

SEQ ID NO: 1056 - RNA, 23 nt, Artificial sequence
  specific aptamers
ggaaggauuggcaugagguacgu

SEQ ID NO: 1057 - RNA, 23 nt, Artificial sequence
  specific aptamers
ggaaggauuggcaugagguacuu

SEQ ID NO: 1058 - RNA, 22 nt, Artificial sequence
  specific aptamers
ggaaggauuggcaugagguacu

SEQ ID NO: 1059 - RNA, 23 nt, Artificial sequence
  specific aptamers
ggaaggauuggcaugagguagau

SEQ ID NO: 1060 - RNA, 23 nt, Artificial sequence
  specific aptamers
ggaaggauuggcaugagguagcu

SEQ ID NO: 1061 - RNA, 23 nt, Artificial sequence
  specific aptamers
ggaaggauuggcaugagguaggu

SEQ ID NO: 1062 - RNA, 23 nt, Artificial sequence
  specific aptamers
ggaaggauuggcaugagguaguu

SEQ ID NO: 1063 - RNA, 22 nt, Artificial sequence
  specific aptamers
ggaaggauuggcaugagguagu

SEQ ID NO: 1064 - RNA, 23 nt, Artificial sequence
  specific aptamers
ggaaggauuggcaugagguauau

SEQ ID NO: 1065 - RNA, 23 nt, Artificial sequence
  specific aptamers
ggaaggauuggcaugagguaucu

SEQ ID NO: 1066 - RNA, 23 nt, Artificial sequence
  specific aptamers
ggaaggauuggcaugagguaugu

SEQ ID NO: 1067 - RNA, 23 nt, Artificial sequence
  specific aptamers
ggaaggauuggcaugagguauuu

SEQ ID NO: 1068 - RNA, 22 nt, Artificial sequence
  specific aptamers
ggaaggauuggcaugagguauu

SEQ ID NO: 1069 - RNA, 23 nt, Artificial sequence
  specific aptamers
ggaaggauugguaugagguaaau

SEQ ID NO: 1070 - RNA, 23 nt, Artificial sequence
  specific aptamers
ggaaggauugguaugagguaacu

SEQ ID NO: 1071 - RNA, 23 nt, Artificial sequence
  specific aptamers
ggaaggauugguaugagguaagu

SEQ ID NO: 1072 - RNA, 23 nt, Artificial sequence
  specific aptamers
ggaaggauugguaugagguaauu

SEQ ID NO: 1073 - RNA, 22 nt, Artificial sequence
  specific aptamers
ggaaggauugguaugagguaau

SEQ ID NO: 1074 - RNA, 23 nt, Artificial sequence
  specific aptamers
ggaaggauugguaugagguacau

SEQ ID NO: 1075 - RNA, 23 nt, Artificial sequence
  specific aptamers
ggaaggauugguaugagguaccu

SEQ ID NO: 1076 - RNA, 23 nt, Artificial sequence
  specific aptamers
ggaaggauugguaugagguacgu

SEQ ID NO: 1077 - RNA, 23 nt, Artificial sequence
  specific aptamers
ggaaggauugguaugagguacuu

SEQ ID NO: 1078 - RNA, 22 nt, Artificial sequence
  specific aptamers
ggaaggauugguaugagguacu

SEQ ID NO: 1079 - RNA, 23 nt, Artificial sequence
  specific aptamers
ggaaggauugguaugagguagau

SEQ ID NO: 1080 - RNA, 23 nt, Artificial sequence
  specific aptamers
ggaaggauugguaugagguagcu

SEQ ID NO: 1081 - RNA, 23 nt, Artificial sequence
  specific aptamers
ggaaggauugguaugagguaggu

SEQ ID NO: 1082 - RNA, 23 nt, Artificial sequence
  specific aptamers
ggaaggauugguaugagguaguu

SEQ ID NO: 1083 - RNA, 22 nt, Artificial sequence
  specific aptamers
ggaaggauugguaugagguagu

SEQ ID NO: 1084 - RNA, 23 nt, Artificial sequence
  specific aptamers
ggaaggauugguaugagguauau

SEQ ID NO: 1085 - RNA, 23 nt, Artificial sequence
  specific aptamers
ggaaggauugguaugagguaucu

SEQ ID NO: 1086 - RNA, 23 nt, Artificial sequence
  specific aptamers
ggaaggauugguaugagguaugu

SEQ ID NO: 1087 - RNA, 23 nt, Artificial sequence
  specific aptamers
ggaaggauugguaugagguauuu

SEQ ID NO: 1088 - RNA, 22 nt, Artificial sequence
  specific aptamers
ggaaggauugguaugagguauu

SEQ ID NO: 1089 - RNA, 23 nt, Artificial sequence
  specific aptamers
gguaggaauggaaugagguaaau

SEQ ID NO: 1090 - RNA, 23 nt, Artificial sequence
  specific aptamers
gguaggaauggaaugagguaacu

SEQ ID NO: 1091 - RNA, 23 nt, Artificial sequence
  specific aptamers
gguaggaauggaaugagguaagu

SEQ ID NO: 1092 - RNA, 23 nt, Artificial sequence
  specific aptamers
gguaggaauggaaugagguaauu

SEQ ID NO: 1093 - RNA, 22 nt, Artificial sequence
  specific aptamers
gguaggaauggaaugagguaau

SEQ ID NO: 1094 - RNA, 23 nt, Artificial sequence
  specific aptamers
gguaggaauggaaugagguacau

SEQ ID NO: 1095 - RNA, 23 nt, Artificial sequence
  specific aptamers
gguaggaauggaaugagguaccu

SEQ ID NO: 1096 - RNA, 23 nt, Artificial sequence
  specific aptamers
gguaggaauggaaugagguacgu

SEQ ID NO: 1097 - RNA, 23 nt, Artificial sequence
  specific aptamers
gguaggaauggaaugagguacuu

SEQ ID NO: 1098 - RNA, 22 nt, Artificial sequence
  specific aptamers
gguaggaauggaaugagguacu

SEQ ID NO: 1099 - RNA, 23 nt, Artificial sequence
  specific aptamers
gguaggaauggaaugagguagau

SEQ ID NO: 1100 - RNA, 23 nt, Artificial sequence
  specific aptamers
gguaggaauggaaugagguagcu

SEQ ID NO: 1101 - RNA, 23 nt, Artificial sequence
  specific aptamers
gguaggaauggaaugagguaggu

SEQ ID NO: 1102 - RNA, 23 nt, Artificial sequence
  specific aptamers
gguaggaauggaaugagguaguu

SEQ ID NO: 1103 - RNA, 22 nt, Artificial sequence
  specific aptamers
gguaggaauggaaugagguagu

SEQ ID NO: 1104 - RNA, 23 nt, Artificial sequence
  specific aptamers
gguaggaauggaaugagguauau

SEQ ID NO: 1105 - RNA, 23 nt, Artificial sequence
  specific aptamers
gguaggaauggaaugagguaucu

SEQ ID NO: 1106 - RNA, 23 nt, Artificial sequence
  specific aptamers
gguaggaauggaaugagguaugu

SEQ ID NO: 1107 - RNA, 23 nt, Artificial sequence
  specific aptamers
gguaggaauggaaugagguauuu

SEQ ID NO: 1108 - RNA, 22 nt, Artificial sequence
  specific aptamers
gguaggaauggaaugagguauu

SEQ ID NO: 1109 - RNA, 23 nt, Artificial sequence
  specific aptamers
gguaggaauggcaugagguaaau

SEQ ID NO: 1110 - RNA, 23 nt, Artificial sequence
  specific aptamers
gguaggaauggcaugagguaacu

SEQ ID NO: 1111 - RNA, 23 nt, Artificial sequence
  specific aptamers
gguaggaauggcaugagguaagu

SEQ ID NO: 1112 - RNA, 23 nt, Artificial sequence
  specific aptamers
gguaggaauggcaugagguaauu

SEQ ID NO: 1113 - RNA, 22 nt, Artificial sequence
  specific aptamers
gguaggaauggcaugagguaau

SEQ ID NO: 1114 - RNA, 23 nt, Artificial sequence
  specific aptamers
gguaggaauggcaugagguacau

SEQ ID NO: 1115 - RNA, 23 nt, Artificial sequence
  specific aptamers
gguaggaauggcaugagguaccu

SEQ ID NO: 1116 - RNA, 23 nt, Artificial sequence
  specific aptamers
gguaggaauggcaugagguacgu

SEQ ID NO: 1117 - RNA, 23 nt, Artificial sequence
  specific aptamers
gguaggaauggcaugagguacuu

SEQ ID NO: 1118 - RNA, 22 nt, Artificial sequence
  specific aptamers
gguaggaauggcaugagguacu

SEQ ID NO: 1119 - RNA, 23 nt, Artificial sequence
  specific aptamers
gguaggaauggcaugagguagau

SEQ ID NO: 1120 - RNA, 23 nt, Artificial sequence
  specific aptamers
gguaggaauggcaugagguagcu

SEQ ID NO: 1121 - RNA, 23 nt, Artificial sequence
  specific aptamers
gguaggaauggcaugagguaggu

SEQ ID NO: 1122 - RNA, 23 nt, Artificial sequence
  specific aptamers
gguaggaauggcaugagguaguu

SEQ ID NO: 1123 - RNA, 22 nt, Artificial sequence
  specific aptamers
gguaggaauggcaugagguagu

SEQ ID NO: 1124 - RNA, 23 nt, Artificial sequence
  specific aptamers
gguaggaauggcaugagguauau

SEQ ID NO: 1125 - RNA, 23 nt, Artificial sequence
  specific aptamers
gguaggaauggcaugagguaucu

SEQ ID NO: 1126 - RNA, 23 nt, Artificial sequence
  specific aptamers
gguaggaauggcaugagguaugu

SEQ ID NO: 1127 - RNA, 23 nt, Artificial sequence
  specific aptamers
gguaggaauggcaugagguauuu

SEQ ID NO: 1128 - RNA, 22 nt, Artificial sequence
  specific aptamers
gguaggaauggcaugagguauu

SEQ ID NO: 1129 - RNA, 23 nt, Artificial sequence
  specific aptamers
gguaggaaugguaugagguaaau

SEQ ID NO: 1130 - RNA, 23 nt, Artificial sequence
  specific aptamers
gguaggaaugguaugagguaacu

SEQ ID NO: 1131 - RNA, 23 nt, Artificial sequence
  specific aptamers
gguaggaaugguaugagguaagu

SEQ ID NO: 1132 - RNA, 23 nt, Artificial sequence
  specific aptamers
gguaggaaugguaugagguaauu

SEQ ID NO: 1133 - RNA, 22 nt, Artificial sequence
  specific aptamers
gguaggaaugguaugagguaau

SEQ ID NO: 1134 - RNA, 23 nt, Artificial sequence
  specific aptamers
gguaggaaugguaugagguacau

SEQ ID NO: 1135 - RNA, 23 nt, Artificial sequence
  specific aptamers
gguaggaaugguaugagguaccu

SEQ ID NO: 1136 - RNA, 23 nt, Artificial sequence
  specific aptamers
gguaggaaugguaugagguacgu

SEQ ID NO: 1137 - RNA, 23 nt, Artificial sequence
  specific aptamers
gguaggaaugguaugagguacuu

SEQ ID NO: 1138 - RNA, 22 nt, Artificial sequence
  specific aptamers
gguaggaaugguaugagguacu

SEQ ID NO: 1139 - RNA, 23 nt, Artificial sequence
  specific aptamers
gguaggaaugguaugagguagau

SEQ ID NO: 1140 - RNA, 23 nt, Artificial sequence
  specific aptamers
gguaggaaugguaugagguagcu

SEQ ID NO: 1141 - RNA, 23 nt, Artificial sequence
  specific aptamers
gguaggaaugguaugagguaggu

SEQ ID NO: 1142 - RNA, 23 nt, Artificial sequence
  specific aptamers
gguaggaaugguaugagguaguu

SEQ ID NO: 1143 - RNA, 22 nt, Artificial sequence
  specific aptamers
gguaggaaugguaugagguagu

SEQ ID NO: 1144 - RNA, 23 nt, Artificial sequence
  specific aptamers
gguaggaaugguaugagguauau

SEQ ID NO: 1145 - RNA, 23 nt, Artificial sequence
  specific aptamers
gguaggaaugguaugagguaucu

SEQ ID NO: 1146 - RNA, 23 nt, Artificial sequence
  specific aptamers
gguaggaaugguaugagguaugu

SEQ ID NO: 1147 - RNA, 23 nt, Artificial sequence
  specific aptamers
gguaggaaugguaugagguauuu

SEQ ID NO: 1148 - RNA, 22 nt, Artificial sequence
  specific aptamers
gguaggaaugguaugagguauu

SEQ ID NO: 1149 - RNA, 23 nt, Artificial sequence
  specific aptamers
gguaggauuggaaugagguaaau

SEQ ID NO: 1150 - RNA, 23 nt, Artificial sequence
  specific aptamers
gguaggauuggaaugagguaacu

SEQ ID NO: 1151 - RNA, 23 nt, Artificial sequence
  specific aptamers
gguaggauuggaaugagguaagu

SEQ ID NO: 1152 - RNA, 23 nt, Artificial sequence
  specific aptamers
gguaggauuggaaugagguaauu

SEQ ID NO: 1153 - RNA, 22 nt, Artificial sequence
  specific aptamers
gguaggauuggaaugagguaau

SEQ ID NO: 1154 - RNA, 23 nt, Artificial sequence
  specific aptamers
gguaggauuggaaugagguacau

SEQ ID NO: 1155 - RNA, 23 nt, Artificial sequence
  specific aptamers
gguaggauuggaaugagguaccu

SEQ ID NO: 1156 - RNA, 23 nt, Artificial sequence
  specific aptamers
gguaggauuggaaugagguacgu

SEQ ID NO: 1157 - RNA, 23 nt, Artificial sequence
  specific aptamers
gguaggauuggaaugagguacuu

SEQ ID NO: 1158 - RNA, 22 nt, Artificial sequence
  specific aptamers
gguaggauuggaaugagguacu

SEQ ID NO: 1159 - RNA, 23 nt, Artificial sequence
  specific aptamers
gguaggauuggaaugagguagau

SEQ ID NO: 1160 - RNA, 23 nt, Artificial sequence
  specific aptamers
gguaggauuggaaugagguagcu

SEQ ID NO: 1161 - RNA, 23 nt, Artificial sequence
  specific aptamers
gguaggauuggaaugagguaggu

SEQ ID NO: 1162 - RNA, 23 nt, Artificial sequence
  specific aptamers
gguaggauuggaaugagguaguu

SEQ ID NO: 1163 - RNA, 22 nt, Artificial sequence
  specific aptamers
gguaggauuggaaugagguagu

SEQ ID NO: 1164 - RNA, 23 nt, Artificial sequence
  specific aptamers
gguaggauuggaaugagguauau

SEQ ID NO: 1165 - RNA, 23 nt, Artificial sequence
  specific aptamers
gguaggauuggaaugagguaucu

SEQ ID NO: 1166 - RNA, 23 nt, Artificial sequence
  specific aptamers
gguaggauuggaaugagguaugu

SEQ ID NO: 1167 - RNA, 23 nt, Artificial sequence
  specific aptamers
gguaggauuggaaugagguauuu

SEQ ID NO: 1168 - RNA, 22 nt, Artificial sequence
  specific aptamers
gguaggauuggaaugagguauu

SEQ ID NO: 1169 - RNA, 23 nt, Artificial sequence
  specific aptamers
gguaggauuggcaugagguaaau

SEQ ID NO: 1170 - RNA, 23 nt, Artificial sequence
  specific aptamers
gguaggauuggcaugagguaacu

SEQ ID NO: 1171 - RNA, 23 nt, Artificial sequence
  specific aptamers
gguaggauuggcaugagguaagu

SEQ ID NO: 1172 - RNA, 23 nt, Artificial sequence
  specific aptamers
gguaggauuggcaugagguaauu

SEQ ID NO: 1173 - RNA, 22 nt, Artificial sequence
  specific aptamers
gguaggauuggcaugagguaau

SEQ ID NO: 1174 - RNA, 23 nt, Artificial sequence
  specific aptamers
gguaggauuggcaugagguacau

SEQ ID NO: 1175 - RNA, 23 nt, Artificial sequence
  specific aptamers
gguaggauuggcaugagguaccu

SEQ ID NO: 1176 - RNA, 23 nt, Artificial sequence
  specific aptamers
gguaggauuggcaugagguacgu

SEQ ID NO: 1177 - RNA, 23 nt, Artificial sequence
  specific aptamers
gguaggauuggcaugagguacuu

SEQ ID NO: 1178 - RNA, 22 nt, Artificial sequence
  specific aptamers
gguaggauuggcaugagguacu

SEQ ID NO: 1179 - RNA, 23 nt, Artificial sequence
  specific aptamers
gguaggauuggcaugagguagau

SEQ ID NO: 1180 - RNA, 23 nt, Artificial sequence
  specific aptamers
gguaggauuggcaugagguagcu

SEQ ID NO: 1181 - RNA, 23 nt, Artificial sequence
  specific aptamers
gguaggauuggcaugagguaggu

SEQ ID NO: 1182 - RNA, 23 nt, Artificial sequence
  specific aptamers
gguaggauuggcaugagguaguu

SEQ ID NO: 1183 - RNA, 22 nt, Artificial sequence
  specific aptamers
gguaggauuggcaugagguagu

SEQ ID NO: 1184 - RNA, 23 nt, Artificial sequence
  specific aptamers
gguaggauuggcaugagguauau

SEQ ID NO: 1185 - RNA, 23 nt, Artificial sequence
  specific aptamers
gguaggauuggcaugagguaucu

SEQ ID NO: 1186 - RNA, 23 nt, Artificial sequence
  specific aptamers
gguaggauuggcaugagguaugu

SEQ ID NO: 1187 - RNA, 23 nt, Artificial sequence
  specific aptamers
gguaggauuggcaugagguauuu

SEQ ID NO: 1188 - RNA, 22 nt, Artificial sequence
  specific aptamers
gguaggauuggcaugagguauu

SEQ ID NO: 1189 - RNA, 23 nt, Artificial sequence
  specific aptamers
gguaggauugguaugagguaaau

SEQ ID NO: 1190 - RNA, 23 nt, Artificial sequence
  specific aptamers
gguaggauugguaugagguaacu

SEQ ID NO: 1191 - RNA, 23 nt, Artificial sequence
  specific aptamers
gguaggauugguaugagguaagu

SEQ ID NO: 1192 - RNA, 23 nt, Artificial sequence
  specific aptamers
gguaggauugguaugagguaauu

SEQ ID NO: 1193 - RNA, 22 nt, Artificial sequence
  specific aptamers
gguaggauugguaugagguaau

SEQ ID NO: 1194 - RNA, 23 nt, Artificial sequence
  specific aptamers
gguaggauugguaugagguacau

SEQ ID NO: 1195 - RNA, 23 nt, Artificial sequence
  specific aptamers
gguaggauugguaugagguaccu

SEQ ID NO: 1196 - RNA, 23 nt, Artificial sequence
  specific aptamers
gguaggauugguaugagguacgu

SEQ ID NO: 1197 - RNA, 23 nt, Artificial sequence
  specific aptamers
gguaggauugguaugagguacuu

SEQ ID NO: 1198 - RNA, 22 nt, Artificial sequence
  specific aptamers
gguaggauugguaugagguacu

SEQ ID NO: 1199 - RNA, 23 nt, Artificial sequence
  specific aptamers
gguaggauugguaugagguagau

SEQ ID NO: 1200 - RNA, 23 nt, Artificial sequence
  specific aptamers
gguaggauugguaugagguagcu

SEQ ID NO: 1201 - RNA, 23 nt, Artificial sequence
  specific aptamers
gguaggauugguaugagguaggu

SEQ ID NO: 1202 - RNA, 23 nt, Artificial sequence
  specific aptamers
gguaggauugguaugagguaguu

SEQ ID NO: 1203 - RNA, 22 nt, Artificial sequence
  specific aptamers
gguaggauugguaugagguagu

SEQ ID NO: 1204 - RNA, 23 nt, Artificial sequence
  specific aptamers
gguaggauugguaugagguauau

SEQ ID NO: 1205 - RNA, 23 nt, Artificial sequence
  specific aptamers
gguaggauugguaugagguaucu

SEQ ID NO: 1206 - RNA, 23 nt, Artificial sequence
  specific aptamers
gguaggauugguaugagguaugu

SEQ ID NO: 1207 - RNA, 23 nt, Artificial sequence
  specific aptamers
gguaggauugguaugagguauuu

SEQ ID NO: 1208 - RNA, 22 nt, Artificial sequence
  specific aptamers
gguaggauugguaugagguauu

SEQ ID NO: 1209 - RNA, 23 nt, Artificial sequence
  specific aptamers
ggaagguauggaaugugguaaaa

SEQ ID NO: 1210 - RNA, 23 nt, Artificial sequence
  specific aptamers
ggaagguauggaaugugguaaca

SEQ ID NO: 1211 - RNA, 23 nt, Artificial sequence
  specific aptamers
ggaagguauggaaugugguaaga

SEQ ID NO: 1212 - RNA, 23 nt, Artificial sequence
  specific aptamers
ggaagguauggaaugugguaaua

SEQ ID NO: 1213 - RNA, 22 nt, Artificial sequence
  specific aptamers
ggaagguauggaaugugguaaa

SEQ ID NO: 1214 - RNA, 23 nt, Artificial sequence
  specific aptamers
ggaagguauggaaugugguacaa

SEQ ID NO: 1215 - RNA, 23 nt, Artificial sequence
  specific aptamers
ggaagguauggaaugugguacca

SEQ ID NO: 1216 - RNA, 23 nt, Artificial sequence
  specific aptamers
ggaagguauggaaugugguacga

SEQ ID NO: 1217 - RNA, 23 nt, Artificial sequence
  specific aptamers
ggaagguauggaaugugguacua

SEQ ID NO: 1218 - RNA, 22 nt, Artificial sequence
  specific aptamers
ggaagguauggaaugugguaca

SEQ ID NO: 1219 - RNA, 23 nt, Artificial sequence
  specific aptamers
ggaagguauggaaugugguagaa

SEQ ID NO: 1220 - RNA, 23 nt, Artificial sequence
  specific aptamers
ggaagguauggaaugugguagca

SEQ ID NO: 1221 - RNA, 23 nt, Artificial sequence
  specific aptamers
ggaagguauggaaugugguagga

SEQ ID NO: 1222 - RNA, 23 nt, Artificial sequence
  specific aptamers
ggaagguauggaaugugguagua

SEQ ID NO: 1223 - RNA, 22 nt, Artificial sequence
  specific aptamers
ggaagguauggaaugugguaga

SEQ ID NO: 1224 - RNA, 23 nt, Artificial sequence
  specific aptamers
ggaagguauggaaugugguauaa

SEQ ID NO: 1225 - RNA, 23 nt, Artificial sequence
  specific aptamers
ggaagguauggaaugugguauca

SEQ ID NO: 1226 - RNA, 23 nt, Artificial sequence
  specific aptamers
ggaagguauggaaugugguauga

SEQ ID NO: 1227 - RNA, 23 nt, Artificial sequence
  specific aptamers
ggaagguauggaaugugguauua

SEQ ID NO: 1228 - RNA, 22 nt, Artificial sequence
  specific aptamers
ggaagguauggaaugugguaua

SEQ ID NO: 1229 - RNA, 23 nt, Artificial sequence
  specific aptamers
ggaagguauggcaugugguaaaa

SEQ ID NO: 1230 - RNA, 23 nt, Artificial sequence
  specific aptamers
ggaagguauggcaugugguaaca

SEQ ID NO: 1231 - RNA, 23 nt, Artificial sequence
  specific aptamers
ggaagguauggcaugugguaaga

SEQ ID NO: 1232 - RNA, 23 nt, Artificial sequence
  specific aptamers
ggaagguauggcaugugguaaua

SEQ ID NO: 1233 - RNA, 22 nt, Artificial sequence
  specific aptamers
ggaagguauggcaugugguaaa

SEQ ID NO: 1234 - RNA, 23 nt, Artificial sequence
  specific aptamers
ggaagguauggcaugugguacaa

SEQ ID NO: 1235 - RNA, 23 nt, Artificial sequence
  specific aptamers
ggaagguauggcaugugguacca

SEQ ID NO: 1236 - RNA, 23 nt, Artificial sequence
  specific aptamers
ggaagguauggcaugugguacga

SEQ ID NO: 1237 - RNA, 23 nt, Artificial sequence
  specific aptamers
ggaagguauggcaugugguacua

SEQ ID NO: 1238 - RNA, 22 nt, Artificial sequence
  specific aptamers
ggaagguauggcaugugguaca

SEQ ID NO: 1239 - RNA, 23 nt, Artificial sequence
  specific aptamers
ggaagguauggcaugugguagaa

SEQ ID NO: 1240 - RNA, 23 nt, Artificial sequence
  specific aptamers
ggaagguauggcaugugguagca

SEQ ID NO: 1241 - RNA, 23 nt, Artificial sequence
  specific aptamers
ggaagguauggcaugugguagga

SEQ ID NO: 1242 - RNA, 23 nt, Artificial sequence
  specific aptamers
ggaagguauggcaugugguagua

SEQ ID NO: 1243 - RNA, 22 nt, Artificial sequence
  specific aptamers
ggaagguauggcaugugguaga

SEQ ID NO: 1244 - RNA, 23 nt, Artificial sequence
  specific aptamers
ggaagguauggcaugugguauaa

SEQ ID NO: 1245 - RNA, 23 nt, Artificial sequence
  specific aptamers
ggaagguauggcaugugguauca

SEQ ID NO: 1246 - RNA, 23 nt, Artificial sequence
  specific aptamers
ggaagguauggcaugugguauga

SEQ ID NO: 1247 - RNA, 23 nt, Artificial sequence
  specific aptamers
ggaagguauggcaugugguauua

SEQ ID NO: 1248 - RNA, 22 nt, Artificial sequence
  specific aptamers
ggaagguauggcaugugguaua

SEQ ID NO: 1249 - RNA, 23 nt, Artificial sequence
  specific aptamers
ggaagguaugguaugugguaaaa

SEQ ID NO: 1250 - RNA, 23 nt, Artificial sequence
  specific aptamers
ggaagguaugguaugugguaaca

SEQ ID NO: 1251 - RNA, 23 nt, Artificial sequence
  specific aptamers
ggaagguaugguaugugguaaga

SEQ ID NO: 1252 - RNA, 23 nt, Artificial sequence
  specific aptamers
ggaagguaugguaugugguaaua

SEQ ID NO: 1253 - RNA, 22 nt, Artificial sequence
  specific aptamers
ggaagguaugguaugugguaaa

SEQ ID NO: 1254 - RNA, 23 nt, Artificial sequence
  specific aptamers
ggaagguaugguaugugguacaa

SEQ ID NO: 1255 - RNA, 23 nt, Artificial sequence
  specific aptamers
ggaagguaugguaugugguacca

SEQ ID NO: 1256 - RNA, 23 nt, Artificial sequence
  specific aptamers
ggaagguaugguaugugguacga

SEQ ID NO: 1257 - RNA, 23 nt, Artificial sequence
  specific aptamers
ggaagguaugguaugugguacua

SEQ ID NO: 1258 - RNA, 22 nt, Artificial sequence
  specific aptamers
ggaagguaugguaugugguaca

SEQ ID NO: 1259 - RNA, 23 nt, Artificial sequence
  specific aptamers
ggaagguaugguaugugguagaa

SEQ ID NO: 1260 - RNA, 23 nt, Artificial sequence
  specific aptamers
ggaagguaugguaugugguagca

SEQ ID NO: 1261 - RNA, 23 nt, Artificial sequence
  specific aptamers
ggaagguaugguaugugguagga

SEQ ID NO: 1262 - RNA, 23 nt, Artificial sequence
  specific aptamers
ggaagguaugguaugugguagua

SEQ ID NO: 1263 - RNA, 22 nt, Artificial sequence
  specific aptamers
ggaagguaugguaugugguaga

SEQ ID NO: 1264 - RNA, 23 nt, Artificial sequence
  specific aptamers
ggaagguaugguaugugguauaa

SEQ ID NO: 1265 - RNA, 23 nt, Artificial sequence
  specific aptamers
ggaagguaugguaugugguauca

SEQ ID NO: 1266 - RNA, 23 nt, Artificial sequence
  specific aptamers
ggaagguaugguaugugguauga

SEQ ID NO: 1267 - RNA, 23 nt, Artificial sequence
  specific aptamers
ggaagguaugguaugugguauua

SEQ ID NO: 1268 - RNA, 22 nt, Artificial sequence
  specific aptamers
ggaagguaugguaugugguaua

SEQ ID NO: 1269 - RNA, 23 nt, Artificial sequence
  specific aptamers
ggaagguuuggaaugugguaaaa

SEQ ID NO: 1270 - RNA, 23 nt, Artificial sequence
  specific aptamers
ggaagguuuggaaugugguaaca

SEQ ID NO: 1271 - RNA, 23 nt, Artificial sequence
  specific aptamers
ggaagguuuggaaugugguaaga

SEQ ID NO: 1272 - RNA, 23 nt, Artificial sequence
  specific aptamers
ggaagguuuggaaugugguaaua

SEQ ID NO: 1273 - RNA, 22 nt, Artificial sequence
  specific aptamers
ggaagguuuggaaugugguaaa

SEQ ID NO: 1274 - RNA, 23 nt, Artificial sequence
  specific aptamers
ggaagguuuggaaugugguacaa

SEQ ID NO: 1275 - RNA, 23 nt, Artificial sequence
  specific aptamers
ggaagguuuggaaugugguacca

SEQ ID NO: 1276 - RNA, 23 nt, Artificial sequence
  specific aptamers
ggaagguuuggaaugugguacga

SEQ ID NO: 1277 - RNA, 23 nt, Artificial sequence
  specific aptamers
ggaagguuuggaaugugguacua

SEQ ID NO: 1278 - RNA, 22 nt, Artificial sequence
  specific aptamers
ggaagguuuggaaugugguaca

SEQ ID NO: 1279 - RNA, 23 nt, Artificial sequence
  specific aptamers
ggaagguuuggaaugugguagaa

SEQ ID NO: 1280 - RNA, 23 nt, Artificial sequence
  specific aptamers
ggaagguuuggaaugugguagca

SEQ ID NO: 1281 - RNA, 23 nt, Artificial sequence
  specific aptamers
ggaagguuuggaaugugguagga

SEQ ID NO: 1282 - RNA, 23 nt, Artificial sequence
  specific aptamers
ggaagguuuggaaugugguagua

SEQ ID NO: 1283 - RNA, 22 nt, Artificial sequence
  specific aptamers
ggaagguuuggaaugugguaga

SEQ ID NO: 1284 - RNA, 23 nt, Artificial sequence
  specific aptamers
ggaagguuuggaaugugguauaa

SEQ ID NO: 1285 - RNA, 23 nt, Artificial sequence
  specific aptamers
ggaagguuuggaaugugguauca

SEQ ID NO: 1286 - RNA, 23 nt, Artificial sequence
  specific aptamers
ggaagguuuggaaugugguauga

SEQ ID NO: 1287 - RNA, 23 nt, Artificial sequence
  specific aptamers
ggaagguuuggaaugugguauua

SEQ ID NO: 1288 - RNA, 22 nt, Artificial sequence
  specific aptamers
ggaagguuuggaaugugguaua

SEQ ID NO: 1289 - RNA, 23 nt, Artificial sequence
  specific aptamers
ggaagguuuggcaugugguaaaa

SEQ ID NO: 1290 - RNA, 23 nt, Artificial sequence
  specific aptamers
ggaagguuuggcaugugguaaca

SEQ ID NO: 1291 - RNA, 23 nt, Artificial sequence
  specific aptamers
ggaagguuuggcaugugguaaga

SEQ ID NO: 1292 - RNA, 23 nt, Artificial sequence
  specific aptamers
ggaagguuuggcaugugguaaua

SEQ ID NO: 1293 - RNA, 22 nt, Artificial sequence
  specific aptamers
ggaagguuuggcaugugguaaa

SEQ ID NO: 1294 - RNA, 23 nt, Artificial sequence
  specific aptamers
ggaagguuuggcaugugguacaa

SEQ ID NO: 1295 - RNA, 23 nt, Artificial sequence
  specific aptamers
ggaagguuuggcaugugguacca

SEQ ID NO: 1296 - RNA, 23 nt, Artificial sequence
  specific aptamers
ggaagguuuggcaugugguacga

SEQ ID NO: 1297 - RNA, 23 nt, Artificial sequence
  specific aptamers
ggaagguuuggcaugugguacua

SEQ ID NO: 1298 - RNA, 22 nt, Artificial sequence
  specific aptamers
ggaagguuuggcaugugguaca

SEQ ID NO: 1299 - RNA, 23 nt, Artificial sequence
  specific aptamers
ggaagguuuggcaugugguagaa

SEQ ID NO: 1300 - RNA, 23 nt, Artificial sequence
  specific aptamers
ggaagguuuggcaugugguagca

SEQ ID NO: 1301 - RNA, 23 nt, Artificial sequence
  specific aptamers
ggaagguuuggcaugugguagga

SEQ ID NO: 1302 - RNA, 23 nt, Artificial sequence
  specific aptamers
ggaagguuuggcaugugguagua

SEQ ID NO: 1303 - RNA, 22 nt, Artificial sequence
  specific aptamers
ggaagguuuggcaugugguaga

SEQ ID NO: 1304 - RNA, 23 nt, Artificial sequence
  specific aptamers
ggaagguuuggcaugugguauaa

SEQ ID NO: 1305 - RNA, 23 nt, Artificial sequence
  specific aptamers
ggaagguuuggcaugugguauca

SEQ ID NO: 1306 - RNA, 23 nt, Artificial sequence
  specific aptamers
ggaagguuuggcaugugguauga

SEQ ID NO: 1307 - RNA, 23 nt, Artificial sequence
  specific aptamers
ggaagguuuggcaugugguauua

SEQ ID NO: 1308 - RNA, 22 nt, Artificial sequence
  specific aptamers
ggaagguuuggcaugugguaua

SEQ ID NO: 1309 - RNA, 23 nt, Artificial sequence
  specific aptamers
ggaagguuugguaugugguaaaa

SEQ ID NO: 1310 - RNA, 23 nt, Artificial sequence
  specific aptamers
ggaagguuugguaugugguaaca

SEQ ID NO: 1311 - RNA, 23 nt, Artificial sequence
  specific aptamers
ggaagguuugguaugugguaaga

SEQ ID NO: 1312 - RNA, 23 nt, Artificial sequence
  specific aptamers
ggaagguuugguaugugguaaua

SEQ ID NO: 1313 - RNA, 22 nt, Artificial sequence
  specific aptamers
ggaagguuugguaugugguaaa

SEQ ID NO: 1314 - RNA, 23 nt, Artificial sequence
  specific aptamers
ggaagguuugguaugugguacaa

SEQ ID NO: 1315 - RNA, 23 nt, Artificial sequence
  specific aptamers
ggaagguuugguaugugguacca

SEQ ID NO: 1316 - RNA, 23 nt, Artificial sequence
  specific aptamers
ggaagguuugguaugugguacga

SEQ ID NO: 1317 - RNA, 23 nt, Artificial sequence
  specific aptamers
ggaagguuugguaugugguacua

SEQ ID NO: 1318 - RNA, 22 nt, Artificial sequence
  specific aptamers
ggaagguuugguaugugguaca

SEQ ID NO: 1319 - RNA, 23 nt, Artificial sequence
  specific aptamers
ggaagguuugguaugugguagaa

SEQ ID NO: 1320 - RNA, 23 nt, Artificial sequence
  specific aptamers
ggaagguuugguaugugguagca

SEQ ID NO: 1321 - RNA, 23 nt, Artificial sequence
  specific aptamers
ggaagguuugguaugugguagga

SEQ ID NO: 1322 - RNA, 23 nt, Artificial sequence
  specific aptamers
ggaagguuugguaugugguagua

SEQ ID NO: 1323 - RNA, 22 nt, Artificial sequence
  specific aptamers
ggaagguuugguaugugguaga

SEQ ID NO: 1324 - RNA, 23 nt, Artificial sequence
  specific aptamers
ggaagguuugguaugugguauaa

SEQ ID NO: 1325 - RNA, 23 nt, Artificial sequence
  specific aptamers
ggaagguuugguaugugguauca

SEQ ID NO: 1326 - RNA, 23 nt, Artificial sequence
  specific aptamers
ggaagguuugguaugugguauga

SEQ ID NO: 1327 - RNA, 23 nt, Artificial sequence
  specific aptamers
ggaagguuugguaugugguauua

SEQ ID NO: 1328 - RNA, 22 nt, Artificial sequence
  specific aptamers
ggaagguuugguaugugguaua

SEQ ID NO: 1329 - RNA, 23 nt, Artificial sequence
  specific aptamers
gguagguauggaaugugguaaaa

SEQ ID NO: 1330 - RNA, 23 nt, Artificial sequence
  specific aptamers
gguagguauggaaugugguaaca

SEQ ID NO: 1331 - RNA, 23 nt, Artificial sequence
  specific aptamers
gguagguauggaaugugguaaga

SEQ ID NO: 1332 - RNA, 23 nt, Artificial sequence
  specific aptamers
gguagguauggaaugugguaaua

SEQ ID NO: 1333 - RNA, 22 nt, Artificial sequence
  specific aptamers
gguagguauggaaugugguaaa

SEQ ID NO: 1334 - RNA, 23 nt, Artificial sequence
  specific aptamers
gguagguauggaaugugguacaa

SEQ ID NO: 1335 - RNA, 23 nt, Artificial sequence
  specific aptamers
gguagguauggaaugugguacca

SEQ ID NO: 1336 - RNA, 23 nt, Artificial sequence
  specific aptamers
gguagguauggaaugugguacga

SEQ ID NO: 1337 - RNA, 23 nt, Artificial sequence
  specific aptamers
gguagguauggaaugugguacua

SEQ ID NO: 1338 - RNA, 22 nt, Artificial sequence
  specific aptamers
gguagguauggaaugugguaca

SEQ ID NO: 1339 - RNA, 23 nt, Artificial sequence
  specific aptamers
gguagguauggaaugugguagaa

SEQ ID NO: 1340 - RNA, 23 nt, Artificial sequence
  specific aptamers
gguagguauggaaugugguagca

SEQ ID NO: 1341 - RNA, 23 nt, Artificial sequence
  specific aptamers
gguagguauggaaugugguagga

SEQ ID NO: 1342 - RNA, 23 nt, Artificial sequence
  specific aptamers
gguagguauggaaugugguagua

SEQ ID NO: 1343 - RNA, 22 nt, Artificial sequence
  specific aptamers
gguagguauggaaugugguaga

SEQ ID NO: 1344 - RNA, 23 nt, Artificial sequence
  specific aptamers
gguagguauggaaugugguauaa

SEQ ID NO: 1345 - RNA, 23 nt, Artificial sequence
  specific aptamers
gguagguauggaaugugguauca

SEQ ID NO: 1346 - RNA, 23 nt, Artificial sequence
  specific aptamers
gguagguauggaaugugguauga

SEQ ID NO: 1347 - RNA, 23 nt, Artificial sequence
  specific aptamers
gguagguauggaaugugguauua

SEQ ID NO: 1348 - RNA, 22 nt, Artificial sequence
  specific aptamers
gguagguauggaaugugguaua

SEQ ID NO: 1349 - RNA, 23 nt, Artificial sequence
  specific aptamers
gguagguauggcaugugguaaaa

SEQ ID NO: 1350 - RNA, 23 nt, Artificial sequence
  specific aptamers
gguagguauggcaugugguaaca

SEQ ID NO: 1351 - RNA, 23 nt, Artificial sequence
  specific aptamers
gguagguauggcaugugguaaga

SEQ ID NO: 1352 - RNA, 23 nt, Artificial sequence
  specific aptamers
gguagguauggcaugugguaaua

SEQ ID NO: 1353 - RNA, 22 nt, Artificial sequence
  specific aptamers
gguagguauggcaugugguaaa

SEQ ID NO: 1354 - RNA, 23 nt, Artificial sequence
  specific aptamers
gguagguauggcaugugguacaa

SEQ ID NO: 1355 - RNA, 23 nt, Artificial sequence
  specific aptamers
gguagguauggcaugugguacca

SEQ ID NO: 1356 - RNA, 23 nt, Artificial sequence
  specific aptamers
gguagguauggcaugugguacga

SEQ ID NO: 1357 - RNA, 23 nt, Artificial sequence
  specific aptamers
gguagguauggcaugugguacua

SEQ ID NO: 1358 - RNA, 22 nt, Artificial sequence
  specific aptamers
gguagguauggcaugugguaca

SEQ ID NO: 1359 - RNA, 23 nt, Artificial sequence
  specific aptamers
gguagguauggcaugugguagaa

SEQ ID NO: 1360 - RNA, 23 nt, Artificial sequence
  specific aptamers
gguagguauggcaugugguagca

SEQ ID NO: 1361 - RNA, 23 nt, Artificial sequence
  specific aptamers
gguagguauggcaugugguagga

SEQ ID NO: 1362 - RNA, 23 nt, Artificial sequence
  specific aptamers
gguagguauggcaugugguagua

SEQ ID NO: 1363 - RNA, 22 nt, Artificial sequence
  specific aptamers
gguagguauggcaugugguaga

SEQ ID NO: 1364 - RNA, 23 nt, Artificial sequence
  specific aptamers
gguagguauggcaugugguauaa

SEQ ID NO: 1365 - RNA, 23 nt, Artificial sequence
  specific aptamers
gguagguauggcaugugguauca

SEQ ID NO: 1366 - RNA, 23 nt, Artificial sequence
  specific aptamers
gguagguauggcaugugguauga

SEQ ID NO: 1367 - RNA, 23 nt, Artificial sequence
  specific aptamers
gguagguauggcaugugguauua

SEQ ID NO: 1368 - RNA, 22 nt, Artificial sequence
  specific aptamers
gguagguauggcaugugguaua

SEQ ID NO: 1369 - RNA, 23 nt, Artificial sequence
  specific aptamers
gguagguaugguaugugguaaaa

SEQ ID NO: 1370 - RNA, 23 nt, Artificial sequence
  specific aptamers
gguagguaugguaugugguaaca

SEQ ID NO: 1371 - RNA, 23 nt, Artificial sequence
  specific aptamers
gguagguaugguaugugguaaga

SEQ ID NO: 1372 - RNA, 23 nt, Artificial sequence
  specific aptamers
gguagguaugguaugugguaaua

SEQ ID NO: 1373 - RNA, 22 nt, Artificial sequence
  specific aptamers
gguagguaugguaugugguaaa

SEQ ID NO: 1374 - RNA, 23 nt, Artificial sequence
  specific aptamers
gguagguaugguaugugguacaa

SEQ ID NO: 1375 - RNA, 23 nt, Artificial sequence
  specific aptamers
gguagguaugguaugugguacca

SEQ ID NO: 1376 - RNA, 23 nt, Artificial sequence
  specific aptamers
gguagguaugguaugugguacga

SEQ ID NO: 1377 - RNA, 23 nt, Artificial sequence
  specific aptamers
gguagguaugguaugugguacua

SEQ ID NO: 1378 - RNA, 22 nt, Artificial sequence
  specific aptamers
gguagguaugguaugugguaca

SEQ ID NO: 1379 - RNA, 23 nt, Artificial sequence
  specific aptamers
gguagguaugguaugugguagaa

SEQ ID NO: 1380 - RNA, 23 nt, Artificial sequence
  specific aptamers
gguagguaugguaugugguagca

SEQ ID NO: 1381 - RNA, 23 nt, Artificial sequence
  specific aptamers
gguagguaugguaugugguagga

SEQ ID NO: 1382 - RNA, 23 nt, Artificial sequence
  specific aptamers
gguagguaugguaugugguagua

SEQ ID NO: 1383 - RNA, 22 nt, Artificial sequence
  specific aptamers
gguagguaugguaugugguaga

SEQ ID NO: 1384 - RNA, 23 nt, Artificial sequence
  specific aptamers
gguagguaugguaugugguauaa

SEQ ID NO: 1385 - RNA, 23 nt, Artificial sequence
  specific aptamers
gguagguaugguaugugguauca

SEQ ID NO: 1386 - RNA, 23 nt, Artificial sequence
  specific aptamers
gguagguaugguaugugguauga

SEQ ID NO: 1387 - RNA, 23 nt, Artificial sequence
  specific aptamers
gguagguaugguaugugguauua

SEQ ID NO: 1388 - RNA, 22 nt, Artificial sequence
  specific aptamers
gguagguaugguaugugguaua

SEQ ID NO: 1389 - RNA, 23 nt, Artificial sequence
  specific aptamers
gguagguuuggaaugugguaaaa

SEQ ID NO: 1390 - RNA, 23 nt, Artificial sequence
  specific aptamers
gguagguuuggaaugugguaaca

SEQ ID NO: 1391 - RNA, 23 nt, Artificial sequence
  specific aptamers
gguagguuuggaaugugguaaga

SEQ ID NO: 1392 - RNA, 23 nt, Artificial sequence
  specific aptamers
gguagguuuggaaugugguaaua

SEQ ID NO: 1393 - RNA, 22 nt, Artificial sequence
  specific aptamers
gguagguuuggaaugugguaaa

SEQ ID NO: 1394 - RNA, 23 nt, Artificial sequence
  specific aptamers
gguagguuuggaaugugguacaa

SEQ ID NO: 1395 - RNA, 23 nt, Artificial sequence
  specific aptamers
gguagguuuggaaugugguacca

SEQ ID NO: 1396 - RNA, 23 nt, Artificial sequence
  specific aptamers
gguagguuuggaaugugguacga

SEQ ID NO: 1397 - RNA, 23 nt, Artificial sequence
  specific aptamers
gguagguuuggaaugugguacua

SEQ ID NO: 1398 - RNA, 22 nt, Artificial sequence
  specific aptamers
gguagguuuggaaugugguaca

SEQ ID NO: 1399 - RNA, 23 nt, Artificial sequence
  specific aptamers
gguagguuuggaaugugguagaa

SEQ ID NO: 1400 - RNA, 23 nt, Artificial sequence
  specific aptamers
gguagguuuggaaugugguagca

SEQ ID NO: 1401 - RNA, 23 nt, Artificial sequence
  specific aptamers
gguagguuuggaaugugguagga

SEQ ID NO: 1402 - RNA, 23 nt, Artificial sequence
  specific aptamers
gguagguuuggaaugugguagua

SEQ ID NO: 1403 - RNA, 22 nt, Artificial sequence
  specific aptamers
gguagguuuggaaugugguaga

SEQ ID NO: 1404 - RNA, 23 nt, Artificial sequence
  specific aptamers
gguagguuuggaaugugguauaa

SEQ ID NO: 1405 - RNA, 23 nt, Artificial sequence
  specific aptamers
gguagguuuggaaugugguauca

SEQ ID NO: 1406 - RNA, 23 nt, Artificial sequence
  specific aptamers
gguagguuuggaaugugguauga

SEQ ID NO: 1407 - RNA, 23 nt, Artificial sequence
  specific aptamers
gguagguuuggaaugugguauua

SEQ ID NO: 1408 - RNA, 22 nt, Artificial sequence
  specific aptamers
gguagguuuggaaugugguaua

SEQ ID NO: 1409 - RNA, 23 nt, Artificial sequence
  specific aptamers
gguagguuuggcaugugguaaaa

SEQ ID NO: 1410 - RNA, 23 nt, Artificial sequence
  specific aptamers
gguagguuuggcaugugguaaca

SEQ ID NO: 1411 - RNA, 23 nt, Artificial sequence
  specific aptamers
gguagguuuggcaugugguaaga

SEQ ID NO: 1412 - RNA, 23 nt, Artificial sequence
  specific aptamers
gguagguuuggcaugugguaaua

SEQ ID NO: 1413 - RNA, 22 nt, Artificial sequence
  specific aptamers
gguagguuuggcaugugguaaa

SEQ ID NO: 1414 - RNA, 23 nt, Artificial sequence
  specific aptamers
gguagguuuggcaugugguacaa

SEQ ID NO: 1415 - RNA, 23 nt, Artificial sequence
  specific aptamers
gguagguuuggcaugugguacca

SEQ ID NO: 1416 - RNA, 23 nt, Artificial sequence
  specific aptamers
gguagguuuggcaugugguacga

SEQ ID NO: 1417 - RNA, 23 nt, Artificial sequence
  specific aptamers
gguagguuuggcaugugguacua

SEQ ID NO: 1418 - RNA, 22 nt, Artificial sequence
  specific aptamers
gguagguuuggcaugugguaca

SEQ ID NO: 1419 - RNA, 23 nt, Artificial sequence
  specific aptamers
gguagguuuggcaugugguagaa

SEQ ID NO: 1420 - RNA, 23 nt, Artificial sequence
  specific aptamers
gguagguuuggcaugugguagca

SEQ ID NO: 1421 - RNA, 23 nt, Artificial sequence
  specific aptamers
gguagguuuggcaugugguagga

SEQ ID NO: 1422 - RNA, 23 nt, Artificial sequence
  specific aptamers
gguagguuuggcaugugguagua

SEQ ID NO: 1423 - RNA, 22 nt, Artificial sequence
  specific aptamers
gguagguuuggcaugugguaga

SEQ ID NO: 1424 - RNA, 23 nt, Artificial sequence
  specific aptamers
gguagguuuggcaugugguauaa

SEQ ID NO: 1425 - RNA, 23 nt, Artificial sequence
  specific aptamers
gguagguuuggcaugugguauca

SEQ ID NO: 1426 - RNA, 23 nt, Artificial sequence
  specific aptamers
gguagguuuggcaugugguauga

SEQ ID NO: 1427 - RNA, 23 nt, Artificial sequence
  specific aptamers
gguagguuuggcaugugguauua

SEQ ID NO: 1428 - RNA, 22 nt, Artificial sequence
  specific aptamers
gguagguuuggcaugugguaua

SEQ ID NO: 1429 - RNA, 23 nt, Artificial sequence
  specific aptamers
gguagguuugguaugugguaaaa

SEQ ID NO: 1430 - RNA, 23 nt, Artificial sequence
  specific aptamers
gguagguuugguaugugguaaca

SEQ ID NO: 1431 - RNA, 23 nt, Artificial sequence
  specific aptamers
gguagguuugguaugugguaaga

SEQ ID NO: 1432 - RNA, 23 nt, Artificial sequence
  specific aptamers
gguagguuugguaugugguaaua

SEQ ID NO: 1433 - RNA, 22 nt, Artificial sequence
  specific aptamers
gguagguuugguaugugguaaa

SEQ ID NO: 1434 - RNA, 23 nt, Artificial sequence
  specific aptamers
gguagguuugguaugugguacaa

SEQ ID NO: 1435 - RNA, 23 nt, Artificial sequence
  specific aptamers
gguagguuugguaugugguacca

SEQ ID NO: 1436 - RNA, 23 nt, Artificial sequence
  specific aptamers
gguagguuugguaugugguacga

SEQ ID NO: 1437 - RNA, 23 nt, Artificial sequence
  specific aptamers
gguagguuugguaugugguacua

SEQ ID NO: 1438 - RNA, 22 nt, Artificial sequence
  specific aptamers
gguagguuugguaugugguaca

SEQ ID NO: 1439 - RNA, 23 nt, Artificial sequence
  specific aptamers
gguagguuugguaugugguagaa

SEQ ID NO: 1440 - RNA, 23 nt, Artificial sequence
  specific aptamers
gguagguuugguaugugguagca

SEQ ID NO: 1441 - RNA, 23 nt, Artificial sequence
  specific aptamers
gguagguuugguaugugguagga

SEQ ID NO: 1442 - RNA, 23 nt, Artificial sequence
  specific aptamers
gguagguuugguaugugguagua

SEQ ID NO: 1443 - RNA, 22 nt, Artificial sequence
  specific aptamers
gguagguuugguaugugguaga

SEQ ID NO: 1444 - RNA, 23 nt, Artificial sequence
  specific aptamers
gguagguuugguaugugguauaa

SEQ ID NO: 1445 - RNA, 23 nt, Artificial sequence
  specific aptamers
gguagguuugguaugugguauca

SEQ ID NO: 1446 - RNA, 23 nt, Artificial sequence
  specific aptamers
gguagguuugguaugugguauga

SEQ ID NO: 1447 - RNA, 23 nt, Artificial sequence
  specific aptamers
gguagguuugguaugugguauua

SEQ ID NO: 1448 - RNA, 22 nt, Artificial sequence
  specific aptamers
gguagguuugguaugugguaua

SEQ ID NO: 1449 - RNA, 23 nt, Artificial sequence
  specific aptamers
ggaagguauggaaugugguaaau

SEQ ID NO: 1450 - RNA, 23 nt, Artificial sequence
  specific aptamers
ggaagguauggaaugugguaacu

SEQ ID NO: 1451 - RNA, 23 nt, Artificial sequence
  specific aptamers
ggaagguauggaaugugguaagu

SEQ ID NO: 1452 - RNA, 23 nt, Artificial sequence
  specific aptamers
ggaagguauggaaugugguaauu

SEQ ID NO: 1453 - RNA, 22 nt, Artificial sequence
  specific aptamers
ggaagguauggaaugugguaau

SEQ ID NO: 1454 - RNA, 23 nt, Artificial sequence
  specific aptamers
ggaagguauggaaugugguacau

SEQ ID NO: 1455 - RNA, 23 nt, Artificial sequence
  specific aptamers
ggaagguauggaaugugguaccu

SEQ ID NO: 1456 - RNA, 23 nt, Artificial sequence
  specific aptamers
ggaagguauggaaugugguacgu

SEQ ID NO: 1457 - RNA, 23 nt, Artificial sequence
  specific aptamers
ggaagguauggaaugugguacuu

SEQ ID NO: 1458 - RNA, 22 nt, Artificial sequence
  specific aptamers
ggaagguauggaaugugguacu

SEQ ID NO: 1459 - RNA, 23 nt, Artificial sequence
  specific aptamers
ggaagguauggaaugugguagau

SEQ ID NO: 1460 - RNA, 23 nt, Artificial sequence
  specific aptamers
ggaagguauggaaugugguagcu

SEQ ID NO: 1461 - RNA, 23 nt, Artificial sequence
  specific aptamers
ggaagguauggaaugugguaggu

SEQ ID NO: 1462 - RNA, 23 nt, Artificial sequence
  specific aptamers
ggaagguauggaaugugguaguu

SEQ ID NO: 1463 - RNA, 22 nt, Artificial sequence
  specific aptamers
ggaagguauggaaugugguagu

SEQ ID NO: 1464 - RNA, 23 nt, Artificial sequence
  specific aptamers
ggaagguauggaaugugguauau

SEQ ID NO: 1465 - RNA, 23 nt, Artificial sequence
  specific aptamers
ggaagguauggaaugugguaucu

SEQ ID NO: 1466 - RNA, 23 nt, Artificial sequence
  specific aptamers
ggaagguauggaaugugguaugu

SEQ ID NO: 1467 - RNA, 23 nt, Artificial sequence
  specific aptamers
ggaagguauggaaugugguauuu

SEQ ID NO: 1468 - RNA, 22 nt, Artificial sequence
  specific aptamers
ggaagguauggaaugugguauu

SEQ ID NO: 1469 - RNA, 23 nt, Artificial sequence
  specific aptamers
ggaagguauggcaugugguaaau

SEQ ID NO: 1470 - RNA, 23 nt, Artificial sequence
  specific aptamers
ggaagguauggcaugugguaacu

SEQ ID NO: 1471 - RNA, 23 nt, Artificial sequence
  specific aptamers
ggaagguauggcaugugguaagu

SEQ ID NO: 1472 - RNA, 23 nt, Artificial sequence
  specific aptamers
ggaagguauggcaugugguaauu

SEQ ID NO: 1473 - RNA, 22 nt, Artificial sequence
  specific aptamers
ggaagguauggcaugugguaau

SEQ ID NO: 1474 - RNA, 23 nt, Artificial sequence
  specific aptamers
ggaagguauggcaugugguacau

SEQ ID NO: 1475 - RNA, 23 nt, Artificial sequence
  specific aptamers
ggaagguauggcaugugguaccu

SEQ ID NO: 1476 - RNA, 23 nt, Artificial sequence
  specific aptamers
ggaagguauggcaugugguacgu

SEQ ID NO: 1477 - RNA, 23 nt, Artificial sequence
  specific aptamers
ggaagguauggcaugugguacuu

SEQ ID NO: 1478 - RNA, 22 nt, Artificial sequence
  specific aptamers
ggaagguauggcaugugguacu

SEQ ID NO: 1479 - RNA, 23 nt, Artificial sequence
  specific aptamers
ggaagguauggcaugugguagau

SEQ ID NO: 1480 - RNA, 23 nt, Artificial sequence
  specific aptamers
ggaagguauggcaugugguagcu

SEQ ID NO: 1481 - RNA, 23 nt, Artificial sequence
  specific aptamers
ggaagguauggcaugugguaggu

SEQ ID NO: 1482 - RNA, 23 nt, Artificial sequence
  specific aptamers
ggaagguauggcaugugguaguu

SEQ ID NO: 1483 - RNA, 22 nt, Artificial sequence
  specific aptamers
ggaagguauggcaugugguagu

SEQ ID NO: 1484 - RNA, 23 nt, Artificial sequence
  specific aptamers
ggaagguauggcaugugguauau

SEQ ID NO: 1485 - RNA, 23 nt, Artificial sequence
  specific aptamers
ggaagguauggcaugugguaucu

SEQ ID NO: 1486 - RNA, 23 nt, Artificial sequence
  specific aptamers
ggaagguauggcaugugguaugu

SEQ ID NO: 1487 - RNA, 23 nt, Artificial sequence
  specific aptamers
ggaagguauggcaugugguauuu

SEQ ID NO: 1488 - RNA, 22 nt, Artificial sequence
  specific aptamers
ggaagguauggcaugugguauu

SEQ ID NO: 1489 - RNA, 23 nt, Artificial sequence
  specific aptamers
ggaagguaugguaugugguaaau

SEQ ID NO: 1490 - RNA, 23 nt, Artificial sequence
  specific aptamers
ggaagguaugguaugugguaacu

SEQ ID NO: 1491 - RNA, 23 nt, Artificial sequence
  specific aptamers
ggaagguaugguaugugguaagu

SEQ ID NO: 1492 - RNA, 23 nt, Artificial sequence
  specific aptamers
ggaagguaugguaugugguaauu

SEQ ID NO: 1493 - RNA, 22 nt, Artificial sequence
  specific aptamers
ggaagguaugguaugugguaau

SEQ ID NO: 1494 - RNA, 23 nt, Artificial sequence
  specific aptamers
ggaagguaugguaugugguacau

SEQ ID NO: 1495 - RNA, 23 nt, Artificial sequence
  specific aptamers
ggaagguaugguaugugguaccu

SEQ ID NO: 1496 - RNA, 23 nt, Artificial sequence
  specific aptamers
ggaagguaugguaugugguacgu

SEQ ID NO: 1497 - RNA, 23 nt, Artificial sequence
  specific aptamers
ggaagguaugguaugugguacuu

SEQ ID NO: 1498 - RNA, 22 nt, Artificial sequence
  specific aptamers
ggaagguaugguaugugguacu

SEQ ID NO: 1499 - RNA, 23 nt, Artificial sequence
  specific aptamers
ggaagguaugguaugugguagau

SEQ ID NO: 1500 - RNA, 23 nt, Artificial sequence
  specific aptamers
ggaagguaugguaugugguagcu

SEQ ID NO: 1501 - RNA, 23 nt, Artificial sequence
  specific aptamers
ggaagguaugguaugugguaggu

SEQ ID NO: 1502 - RNA, 23 nt, Artificial sequence
  specific aptamers
ggaagguaugguaugugguaguu

SEQ ID NO: 1503 - RNA, 22 nt, Artificial sequence
  specific aptamers
ggaagguaugguaugugguagu

SEQ ID NO: 1504 - RNA, 23 nt, Artificial sequence
  specific aptamers
ggaagguaugguaugugguauau

SEQ ID NO: 1505 - RNA, 23 nt, Artificial sequence
  specific aptamers
ggaagguaugguaugugguaucu

SEQ ID NO: 1506 - RNA, 23 nt, Artificial sequence
  specific aptamers
ggaagguaugguaugugguaugu

SEQ ID NO: 1507 - RNA, 23 nt, Artificial sequence
  specific aptamers
ggaagguaugguaugugguauuu

SEQ ID NO: 1508 - RNA, 22 nt, Artificial sequence
  specific aptamers
ggaagguaugguaugugguauu

SEQ ID NO: 1509 - RNA, 23 nt, Artificial sequence
  specific aptamers
ggaagguuuggaaugugguaaau

SEQ ID NO: 1510 - RNA, 23 nt, Artificial sequence
  specific aptamers
ggaagguuuggaaugugguaacu

SEQ ID NO: 1511 - RNA, 23 nt, Artificial sequence
  specific aptamers
ggaagguuuggaaugugguaagu

SEQ ID NO: 1512 - RNA, 23 nt, Artificial sequence
  specific aptamers
ggaagguuuggaaugugguaauu

SEQ ID NO: 1513 - RNA, 22 nt, Artificial sequence
  specific aptamers
ggaagguuuggaaugugguaau

SEQ ID NO: 1514 - RNA, 23 nt, Artificial sequence
  specific aptamers
ggaagguuuggaaugugguacau

SEQ ID NO: 1515 - RNA, 23 nt, Artificial sequence
  specific aptamers
ggaagguuuggaaugugguaccu

SEQ ID NO: 1516 - RNA, 23 nt, Artificial sequence
  specific aptamers
ggaagguuuggaaugugguacgu

SEQ ID NO: 1517 - RNA, 23 nt, Artificial sequence
  specific aptamers
ggaagguuuggaaugugguacuu

SEQ ID NO: 1518 - RNA, 22 nt, Artificial sequence
  specific aptamers
ggaagguuuggaaugugguacu

SEQ ID NO: 1519 - RNA, 23 nt, Artificial sequence
  specific aptamers
ggaagguuuggaaugugguagau

SEQ ID NO: 1520 - RNA, 23 nt, Artificial sequence
  specific aptamers
ggaagguuuggaaugugguagcu

SEQ ID NO: 1521 - RNA, 23 nt, Artificial sequence
  specific aptamers
ggaagguuuggaaugugguaggu

SEQ ID NO: 1522 - RNA, 23 nt, Artificial sequence
  specific aptamers
ggaagguuuggaaugugguaguu

SEQ ID NO: 1523 - RNA, 22 nt, Artificial sequence
  specific aptamers
ggaagguuuggaaugugguagu

SEQ ID NO: 1524 - RNA, 23 nt, Artificial sequence
  specific aptamers
ggaagguuuggaaugugguauau

SEQ ID NO: 1525 - RNA, 23 nt, Artificial sequence
  specific aptamers
ggaagguuuggaaugugguaucu

SEQ ID NO: 1526 - RNA, 23 nt, Artificial sequence
  specific aptamers
ggaagguuuggaaugugguaugu

SEQ ID NO: 1527 - RNA, 23 nt, Artificial sequence
  specific aptamers
ggaagguuuggaaugugguauuu

SEQ ID NO: 1528 - RNA, 22 nt, Artificial sequence
  specific aptamers
ggaagguuuggaaugugguauu

SEQ ID NO: 1529 - RNA, 23 nt, Artificial sequence
  specific aptamers
ggaagguuuggcaugugguaaau

SEQ ID NO: 1530 - RNA, 23 nt, Artificial sequence
  specific aptamers
ggaagguuuggcaugugguaacu

SEQ ID NO: 1531 - RNA, 23 nt, Artificial sequence
  specific aptamers
ggaagguuuggcaugugguaagu

SEQ ID NO: 1532 - RNA, 23 nt, Artificial sequence
  specific aptamers
ggaagguuuggcaugugguaauu

SEQ ID NO: 1533 - RNA, 22 nt, Artificial sequence
  specific aptamers
ggaagguuuggcaugugguaau

SEQ ID NO: 1534 - RNA, 23 nt, Artificial sequence
  specific aptamers
ggaagguuuggcaugugguacau

SEQ ID NO: 1535 - RNA, 23 nt, Artificial sequence
  specific aptamers
ggaagguuuggcaugugguaccu

SEQ ID NO: 1536 - RNA, 23 nt, Artificial sequence
  specific aptamers
ggaagguuuggcaugugguacgu

SEQ ID NO: 1537 - RNA, 23 nt, Artificial sequence
  specific aptamers
ggaagguuuggcaugugguacuu

SEQ ID NO: 1538 - RNA, 22 nt, Artificial sequence
  specific aptamers
ggaagguuuggcaugugguacu

SEQ ID NO: 1539 - RNA, 23 nt, Artificial sequence
  specific aptamers
ggaagguuuggcaugugguagau

SEQ ID NO: 1540 - RNA, 23 nt, Artificial sequence
  specific aptamers
ggaagguuuggcaugugguagcu

SEQ ID NO: 1541 - RNA, 23 nt, Artificial sequence
  specific aptamers
ggaagguuuggcaugugguaggu

SEQ ID NO: 1542 - RNA, 23 nt, Artificial sequence
  specific aptamers
ggaagguuuggcaugugguaguu

SEQ ID NO: 1543 - RNA, 22 nt, Artificial sequence
  specific aptamers
ggaagguuuggcaugugguagu

SEQ ID NO: 1544 - RNA, 23 nt, Artificial sequence
  specific aptamers
ggaagguuuggcaugugguauau

SEQ ID NO: 1545 - RNA, 23 nt, Artificial sequence
  specific aptamers
ggaagguuuggcaugugguaucu

SEQ ID NO: 1546 - RNA, 23 nt, Artificial sequence
  specific aptamers
ggaagguuuggcaugugguaugu

SEQ ID NO: 1547 - RNA, 23 nt, Artificial sequence
  specific aptamers
ggaagguuuggcaugugguauuu

SEQ ID NO: 1548 - RNA, 22 nt, Artificial sequence
  specific aptamers
ggaagguuuggcaugugguauu

SEQ ID NO: 1549 - RNA, 23 nt, Artificial sequence
  specific aptamers
ggaagguuugguaugugguaaau

SEQ ID NO: 1550 - RNA, 23 nt, Artificial sequence
  specific aptamers
ggaagguuugguaugugguaacu

SEQ ID NO: 1551 - RNA, 23 nt, Artificial sequence
  specific aptamers
ggaagguuugguaugugguaagu

SEQ ID NO: 1552 - RNA, 23 nt, Artificial sequence
  specific aptamers
ggaagguuugguaugugguaauu

SEQ ID NO: 1553 - RNA, 22 nt, Artificial sequence
  specific aptamers
ggaagguuugguaugugguaau

SEQ ID NO: 1554 - RNA, 23 nt, Artificial sequence
  specific aptamers
ggaagguuugguaugugguacau

SEQ ID NO: 1555 - RNA, 23 nt, Artificial sequence
  specific aptamers
ggaagguuugguaugugguaccu

SEQ ID NO: 1556 - RNA, 23 nt, Artificial sequence
  specific aptamers
ggaagguuugguaugugguacgu

SEQ ID NO: 1557 - RNA, 23 nt, Artificial sequence
  specific aptamers
ggaagguuugguaugugguacuu

SEQ ID NO: 1558 - RNA, 22 nt, Artificial sequence
  specific aptamers
ggaagguuugguaugugguacu

SEQ ID NO: 1559 - RNA, 23 nt, Artificial sequence
  specific aptamers
ggaagguuugguaugugguagau

SEQ ID NO: 1560 - RNA, 23 nt, Artificial sequence
  specific aptamers
ggaagguuugguaugugguagcu

SEQ ID NO: 1561 - RNA, 23 nt, Artificial sequence
  specific aptamers
ggaagguuugguaugugguaggu

SEQ ID NO: 1562 - RNA, 23 nt, Artificial sequence
  specific aptamers
ggaagguuugguaugugguaguu

SEQ ID NO: 1563 - RNA, 22 nt, Artificial sequence
  specific aptamers
ggaagguuugguaugugguagu

SEQ ID NO: 1564 - RNA, 23 nt, Artificial sequence
  specific aptamers
ggaagguuugguaugugguauau

SEQ ID NO: 1565 - RNA, 23 nt, Artificial sequence
  specific aptamers
ggaagguuugguaugugguaucu

SEQ ID NO: 1566 - RNA, 23 nt, Artificial sequence
  specific aptamers
ggaagguuugguaugugguaugu

SEQ ID NO: 1567 - RNA, 23 nt, Artificial sequence
  specific aptamers
ggaagguuugguaugugguauuu

SEQ ID NO: 1568 - RNA, 22 nt, Artificial sequence
  specific aptamers
ggaagguuugguaugugguauu

SEQ ID NO: 1569 - RNA, 23 nt, Artificial sequence
  specific aptamers
gguagguauggaaugugguaaau

SEQ ID NO: 1570 - RNA, 23 nt, Artificial sequence
  specific aptamers
gguagguauggaaugugguaacu

SEQ ID NO: 1571 - RNA, 23 nt, Artificial sequence
  specific aptamers
gguagguauggaaugugguaagu

SEQ ID NO: 1572 - RNA, 23 nt, Artificial sequence
  specific aptamers
gguagguauggaaugugguaauu

SEQ ID NO: 1573 - RNA, 22 nt, Artificial sequence
  specific aptamers
gguagguauggaaugugguaau

SEQ ID NO: 1574 - RNA, 23 nt, Artificial sequence
  specific aptamers
gguagguauggaaugugguacau

SEQ ID NO: 1575 - RNA, 23 nt, Artificial sequence
  specific aptamers
gguagguauggaaugugguaccu

SEQ ID NO: 1576 - RNA, 23 nt, Artificial sequence
  specific aptamers
gguagguauggaaugugguacgu

SEQ ID NO: 1577 - RNA, 23 nt, Artificial sequence
  specific aptamers
gguagguauggaaugugguacuu

SEQ ID NO: 1578 - RNA, 22 nt, Artificial sequence
  specific aptamers
gguagguauggaaugugguacu

SEQ ID NO: 1579 - RNA, 23 nt, Artificial sequence
  specific aptamers
gguagguauggaaugugguagau

SEQ ID NO: 1580 - RNA, 23 nt, Artificial sequence
  specific aptamers
gguagguauggaaugugguagcu

SEQ ID NO: 1581 - RNA, 23 nt, Artificial sequence
  specific aptamers
gguagguauggaaugugguaggu

SEQ ID NO: 1582 - RNA, 23 nt, Artificial sequence
  specific aptamers
gguagguauggaaugugguaguu

SEQ ID NO: 1583 - RNA, 22 nt, Artificial sequence
  specific aptamers
gguagguauggaaugugguagu

SEQ ID NO: 1584 - RNA, 23 nt, Artificial sequence
  specific aptamers
gguagguauggaaugugguauau

SEQ ID NO: 1585 - RNA, 23 nt, Artificial sequence
  specific aptamers
gguagguauggaaugugguaucu

SEQ ID NO: 1586 - RNA, 23 nt, Artificial sequence
  specific aptamers
gguagguauggaaugugguaugu

SEQ ID NO: 1587 - RNA, 23 nt, Artificial sequence
  specific aptamers
gguagguauggaaugugguauuu

SEQ ID NO: 1588 - RNA, 22 nt, Artificial sequence
  specific aptamers
gguagguauggaaugugguauu

SEQ ID NO: 1589 - RNA, 23 nt, Artificial sequence
  specific aptamers
gguagguauggcaugugguaaau

SEQ ID NO: 1590 - RNA, 23 nt, Artificial sequence
  specific aptamers
gguagguauggcaugugguaacu

SEQ ID NO: 1591 - RNA, 23 nt, Artificial sequence
  specific aptamers
gguagguauggcaugugguaagu

SEQ ID NO: 1592 - RNA, 23 nt, Artificial sequence
  specific aptamers
gguagguauggcaugugguaauu

SEQ ID NO: 1593 - RNA, 22 nt, Artificial sequence
  specific aptamers
gguagguauggcaugugguaau

SEQ ID NO: 1594 - RNA, 23 nt, Artificial sequence
  specific aptamers
gguagguauggcaugugguacau

SEQ ID NO: 1595 - RNA, 23 nt, Artificial sequence
  specific aptamers
gguagguauggcaugugguaccu

SEQ ID NO: 1596 - RNA, 23 nt, Artificial sequence
  specific aptamers
gguagguauggcaugugguacgu

SEQ ID NO: 1597 - RNA, 23 nt, Artificial sequence
  specific aptamers
gguagguauggcaugugguacuu

SEQ ID NO: 1598 - RNA, 22 nt, Artificial sequence
  specific aptamers
gguagguauggcaugugguacu

SEQ ID NO: 1599 - RNA, 23 nt, Artificial sequence
  specific aptamers
gguagguauggcaugugguagau

SEQ ID NO: 1600 - RNA, 23 nt, Artificial sequence
  specific aptamers
gguagguauggcaugugguagcu

SEQ ID NO: 1601 - RNA, 23 nt, Artificial sequence
  specific aptamers
gguagguauggcaugugguaggu

SEQ ID NO: 1602 - RNA, 23 nt, Artificial sequence
  specific aptamers
gguagguauggcaugugguaguu

SEQ ID NO: 1603 - RNA, 22 nt, Artificial sequence
  specific aptamers
gguagguauggcaugugguagu

SEQ ID NO: 1604 - RNA, 23 nt, Artificial sequence
  specific aptamers
gguagguauggcaugugguauau

SEQ ID NO: 1605 - RNA, 23 nt, Artificial sequence
  specific aptamers
gguagguauggcaugugguaucu

SEQ ID NO: 1606 - RNA, 23 nt, Artificial sequence
  specific aptamers
gguagguauggcaugugguaugu

SEQ ID NO: 1607 - RNA, 23 nt, Artificial sequence
  specific aptamers
gguagguauggcaugugguauuu

SEQ ID NO: 1608 - RNA, 22 nt, Artificial sequence
  specific aptamers
gguagguauggcaugugguauu

SEQ ID NO: 1609 - RNA, 23 nt, Artificial sequence
  specific aptamers
gguagguaugguaugugguaaau

SEQ ID NO: 1610 - RNA, 23 nt, Artificial sequence
  specific aptamers
gguagguaugguaugugguaacu

SEQ ID NO: 1611 - RNA, 23 nt, Artificial sequence
  specific aptamers
gguagguaugguaugugguaagu

SEQ ID NO: 1612 - RNA, 23 nt, Artificial sequence
  specific aptamers
gguagguaugguaugugguaauu

SEQ ID NO: 1613 - RNA, 22 nt, Artificial sequence
  specific aptamers
gguagguaugguaugugguaau

SEQ ID NO: 1614 - RNA, 23 nt, Artificial sequence
  specific aptamers
gguagguaugguaugugguacau

SEQ ID NO: 1615 - RNA, 23 nt, Artificial sequence
  specific aptamers
gguagguaugguaugugguaccu

SEQ ID NO: 1616 - RNA, 23 nt, Artificial sequence
  specific aptamers
gguagguaugguaugugguacgu

SEQ ID NO: 1617 - RNA, 23 nt, Artificial sequence
  specific aptamers
gguagguaugguaugugguacuu

SEQ ID NO: 1618 - RNA, 22 nt, Artificial sequence
  specific aptamers
gguagguaugguaugugguacu

SEQ ID NO: 1619 - RNA, 23 nt, Artificial sequence
  specific aptamers
gguagguaugguaugugguagau

SEQ ID NO: 1620 - RNA, 23 nt, Artificial sequence
  specific aptamers
gguagguaugguaugugguagcu

SEQ ID NO: 1621 - RNA, 23 nt, Artificial sequence
  specific aptamers
gguagguaugguaugugguaggu

SEQ ID NO: 1622 - RNA, 23 nt, Artificial sequence
  specific aptamers
gguagguaugguaugugguaguu

SEQ ID NO: 1623 - RNA, 22 nt, Artificial sequence
  specific aptamers
gguagguaugguaugugguagu

SEQ ID NO: 1624 - RNA, 23 nt, Artificial sequence
  specific aptamers
gguagguaugguaugugguauau

SEQ ID NO: 1625 - RNA, 23 nt, Artificial sequence
  specific aptamers
gguagguaugguaugugguaucu

SEQ ID NO: 1626 - RNA, 23 nt, Artificial sequence
  specific aptamers
gguagguaugguaugugguaugu

SEQ ID NO: 1627 - RNA, 23 nt, Artificial sequence
  specific aptamers
gguagguaugguaugugguauuu

SEQ ID NO: 1628 - RNA, 22 nt, Artificial sequence
  specific aptamers
gguagguaugguaugugguauu

SEQ ID NO: 1629 - RNA, 23 nt, Artificial sequence
  specific aptamers
gguagguuuggaaugugguaaau

SEQ ID NO: 1630 - RNA, 23 nt, Artificial sequence
  specific aptamers
gguagguuuggaaugugguaacu

SEQ ID NO: 1631 - RNA, 23 nt, Artificial sequence
  specific aptamers
gguagguuuggaaugugguaagu

SEQ ID NO: 1632 - RNA, 23 nt, Artificial sequence
  specific aptamers
gguagguuuggaaugugguaauu

SEQ ID NO: 1633 - RNA, 22 nt, Artificial sequence
  specific aptamers
gguagguuuggaaugugguaau

SEQ ID NO: 1634 - RNA, 23 nt, Artificial sequence
  specific aptamers
gguagguuuggaaugugguacau

SEQ ID NO: 1635 - RNA, 23 nt, Artificial sequence
  specific aptamers
gguagguuuggaaugugguaccu

SEQ ID NO: 1636 - RNA, 23 nt, Artificial sequence
  specific aptamers
gguagguuuggaaugugguacgu

SEQ ID NO: 1637 - RNA, 23 nt, Artificial sequence
  specific aptamers
gguagguuuggaaugugguacuu

SEQ ID NO: 1638 - RNA, 22 nt, Artificial sequence
  specific aptamers
gguagguuuggaaugugguacu

SEQ ID NO: 1639 - RNA, 23 nt, Artificial sequence
  specific aptamers
gguagguuuggaaugugguagau

SEQ ID NO: 1640 - RNA, 23 nt, Artificial sequence
  specific aptamers
gguagguuuggaaugugguagcu

SEQ ID NO: 1641 - RNA, 23 nt, Artificial sequence
  specific aptamers
gguagguuuggaaugugguaggu

SEQ ID NO: 1642 - RNA, 23 nt, Artificial sequence
  specific aptamers
gguagguuuggaaugugguaguu

SEQ ID NO: 1643 - RNA, 22 nt, Artificial sequence
  specific aptamers
gguagguuuggaaugugguagu

SEQ ID NO: 1644 - RNA, 23 nt, Artificial sequence
  specific aptamers
gguagguuuggaaugugguauau

SEQ ID NO: 1645 - RNA, 23 nt, Artificial sequence
  specific aptamers
gguagguuuggaaugugguaucu

SEQ ID NO: 1646 - RNA, 23 nt, Artificial sequence
  specific aptamers
gguagguuuggaaugugguaugu

SEQ ID NO: 1647 - RNA, 23 nt, Artificial sequence
  specific aptamers
gguagguuuggaaugugguauuu

SEQ ID NO: 1648 - RNA, 22 nt, Artificial sequence
  specific aptamers
gguagguuuggaaugugguauu

SEQ ID NO: 1649 - RNA, 23 nt, Artificial sequence
  specific aptamers
gguagguuuggcaugugguaaau

SEQ ID NO: 1650 - RNA, 23 nt, Artificial sequence
  specific aptamers
gguagguuuggcaugugguaacu

SEQ ID NO: 1651 - RNA, 23 nt, Artificial sequence
  specific aptamers
gguagguuuggcaugugguaagu

SEQ ID NO: 1652 - RNA, 23 nt, Artificial sequence
  specific aptamers
gguagguuuggcaugugguaauu

SEQ ID NO: 1653 - RNA, 22 nt, Artificial sequence
  specific aptamers
gguagguuuggcaugugguaau

SEQ ID NO: 1654 - RNA, 23 nt, Artificial sequence
  specific aptamers
gguagguuuggcaugugguacau

SEQ ID NO: 1655 - RNA, 23 nt, Artificial sequence
  specific aptamers
gguagguuuggcaugugguaccu

SEQ ID NO: 1656 - RNA, 23 nt, Artificial sequence
  specific aptamers
gguagguuuggcaugugguacgu

SEQ ID NO: 1657 - RNA, 23 nt, Artificial sequence
  specific aptamers
gguagguuuggcaugugguacuu

SEQ ID NO: 1658 - RNA, 22 nt, Artificial sequence
  specific aptamers
gguagguuuggcaugugguacu

SEQ ID NO: 1659 - RNA, 23 nt, Artificial sequence
  specific aptamers
gguagguuuggcaugugguagau

SEQ ID NO: 1660 - RNA, 23 nt, Artificial sequence
  specific aptamers
gguagguuuggcaugugguagcu

SEQ ID NO: 1661 - RNA, 23 nt, Artificial sequence
  specific aptamers
gguagguuuggcaugugguaggu

SEQ ID NO: 1662 - RNA, 23 nt, Artificial sequence
  specific aptamers
gguagguuuggcaugugguaguu

SEQ ID NO: 1663 - RNA, 22 nt, Artificial sequence
  specific aptamers
gguagguuuggcaugugguagu

SEQ ID NO: 1664 - RNA, 23 nt, Artificial sequence
  specific aptamers
gguagguuuggcaugugguauau

SEQ ID NO: 1665 - RNA, 23 nt, Artificial sequence
  specific aptamers
gguagguuuggcaugugguaucu

SEQ ID NO: 1666 - RNA, 23 nt, Artificial sequence
  specific aptamers
gguagguuuggcaugugguaugu

SEQ ID NO: 1667 - RNA, 23 nt, Artificial sequence
  specific aptamers
gguagguuuggcaugugguauuu

SEQ ID NO: 1668 - RNA, 22 nt, Artificial sequence
  specific aptamers
gguagguuuggcaugugguauu

SEQ ID NO: 1669 - RNA, 23 nt, Artificial sequence
  specific aptamers
gguagguuugguaugugguaaau

SEQ ID NO: 1670 - RNA, 23 nt, Artificial sequence
  specific aptamers
gguagguuugguaugugguaacu

SEQ ID NO: 1671 - RNA, 23 nt, Artificial sequence
  specific aptamers
gguagguuugguaugugguaagu

SEQ ID NO: 1672 - RNA, 23 nt, Artificial sequence
  specific aptamers
gguagguuugguaugugguaauu

SEQ ID NO: 1673 - RNA, 22 nt, Artificial sequence
  specific aptamers
gguagguuugguaugugguaau

SEQ ID NO: 1674 - RNA, 23 nt, Artificial sequence
  specific aptamers
gguagguuugguaugugguacau

SEQ ID NO: 1675 - RNA, 23 nt, Artificial sequence
  specific aptamers
gguagguuugguaugugguaccu

SEQ ID NO: 1676 - RNA, 23 nt, Artificial sequence
  specific aptamers
gguagguuugguaugugguacgu

SEQ ID NO: 1677 - RNA, 23 nt, Artificial sequence
  specific aptamers
gguagguuugguaugugguacuu

SEQ ID NO: 1678 - RNA, 22 nt, Artificial sequence
  specific aptamers
gguagguuugguaugugguacu

SEQ ID NO: 1679 - RNA, 23 nt, Artificial sequence
  specific aptamers
gguagguuugguaugugguagau

SEQ ID NO: 1680 - RNA, 23 nt, Artificial sequence
  specific aptamers
gguagguuugguaugugguagcu

SEQ ID NO: 1681 - RNA, 23 nt, Artificial sequence
  specific aptamers
gguagguuugguaugugguaggu

SEQ ID NO: 1682 - RNA, 23 nt, Artificial sequence
  specific aptamers
gguagguuugguaugugguaguu

SEQ ID NO: 1683 - RNA, 22 nt, Artificial sequence
  specific aptamers
gguagguuugguaugugguagu

SEQ ID NO: 1684 - RNA, 23 nt, Artificial sequence
  specific aptamers
gguagguuugguaugugguauau

SEQ ID NO: 1685 - RNA, 23 nt, Artificial sequence
  specific aptamers
gguagguuugguaugugguaucu

SEQ ID NO: 1686 - RNA, 23 nt, Artificial sequence
  specific aptamers
gguagguuugguaugugguaugu

SEQ ID NO: 1687 - RNA, 23 nt, Artificial sequence
  specific aptamers
gguagguuugguaugugguauuu

SEQ ID NO: 1688 - RNA, 22 nt, Artificial sequence
  specific aptamers
gguagguuugguaugugguauu

SEQ ID NO: 1689 - RNA, 23 nt, Artificial sequence
  specific aptamers
ggaagguauggaaugggguaaau

SEQ ID NO: 1690 - RNA, 23 nt, Artificial sequence
  specific aptamers
ggaagguauggaaugggguaacu

SEQ ID NO: 1691 - RNA, 23 nt, Artificial sequence
  specific aptamers
ggaagguauggaaugggguaagu

SEQ ID NO: 1692 - RNA, 23 nt, Artificial sequence
  specific aptamers
ggaagguauggaaugggguaauu

SEQ ID NO: 1693 - RNA, 22 nt, Artificial sequence
  specific aptamers
ggaagguauggaaugggguaau

SEQ ID NO: 1694 - RNA, 23 nt, Artificial sequence
  specific aptamers
ggaagguauggaaugggguacau

SEQ ID NO: 1695 - RNA, 23 nt, Artificial sequence
  specific aptamers
ggaagguauggaaugggguaccu

SEQ ID NO: 1696 - RNA, 23 nt, Artificial sequence
  specific aptamers
ggaagguauggaaugggguacgu

SEQ ID NO: 1697 - RNA, 23 nt, Artificial sequence
  specific aptamers
ggaagguauggaaugggguacuu

SEQ ID NO: 1698 - RNA, 22 nt, Artificial sequence
  specific aptamers
ggaagguauggaaugggguacu

SEQ ID NO: 1699 - RNA, 23 nt, Artificial sequence
  specific aptamers
ggaagguauggaaugggguagau

SEQ ID NO: 1700 - RNA, 23 nt, Artificial sequence
  specific aptamers
ggaagguauggaaugggguagcu

SEQ ID NO: 1701 - RNA, 23 nt, Artificial sequence
  specific aptamers
ggaagguauggaaugggguaggu

SEQ ID NO: 1702 - RNA, 23 nt, Artificial sequence
  specific aptamers
ggaagguauggaaugggguaguu

SEQ ID NO: 1703 - RNA, 22 nt, Artificial sequence
  specific aptamers
ggaagguauggaaugggguagu

SEQ ID NO: 1704 - RNA, 23 nt, Artificial sequence
  specific aptamers
ggaagguauggaaugggguauau

SEQ ID NO: 1705 - RNA, 23 nt, Artificial sequence
  specific aptamers
ggaagguauggaaugggguaucu

SEQ ID NO: 1706 - RNA, 23 nt, Artificial sequence
  specific aptamers
ggaagguauggaaugggguaugu

SEQ ID NO: 1707 - RNA, 23 nt, Artificial sequence
  specific aptamers
ggaagguauggaaugggguauuu

SEQ ID NO: 1708 - RNA, 22 nt, Artificial sequence
  specific aptamers
ggaagguauggaaugggguauu

SEQ ID NO: 1709 - RNA, 23 nt, Artificial sequence
  specific aptamers
ggaagguauggcaugggguaaau

SEQ ID NO: 1710 - RNA, 23 nt, Artificial sequence
  specific aptamers
ggaagguauggcaugggguaacu

SEQ ID NO: 1711 - RNA, 23 nt, Artificial sequence
  specific aptamers
ggaagguauggcaugggguaagu

SEQ ID NO: 1712 - RNA, 23 nt, Artificial sequence
  specific aptamers
ggaagguauggcaugggguaauu

SEQ ID NO: 1713 - RNA, 22 nt, Artificial sequence
  specific aptamers
ggaagguauggcaugggguaau

SEQ ID NO: 1714 - RNA, 23 nt, Artificial sequence
  specific aptamers
ggaagguauggcaugggguacau

SEQ ID NO: 1715 - RNA, 23 nt, Artificial sequence
  specific aptamers
ggaagguauggcaugggguaccu

SEQ ID NO: 1716 - RNA, 23 nt, Artificial sequence
  specific aptamers
ggaagguauggcaugggguacgu

SEQ ID NO: 1717 - RNA, 23 nt, Artificial sequence
  specific aptamers
ggaagguauggcaugggguacuu

SEQ ID NO: 1718 - RNA, 22 nt, Artificial sequence
  specific aptamers
ggaagguauggcaugggguacu

SEQ ID NO: 1719 - RNA, 23 nt, Artificial sequence
  specific aptamers
ggaagguauggcaugggguagau

SEQ ID NO: 1720 - RNA, 23 nt, Artificial sequence
  specific aptamers
ggaagguauggcaugggguagcu

SEQ ID NO: 1721 - RNA, 23 nt, Artificial sequence
  specific aptamers
ggaagguauggcaugggguaggu

SEQ ID NO: 1722 - RNA, 23 nt, Artificial sequence
  specific aptamers
ggaagguauggcaugggguaguu

SEQ ID NO: 1723 - RNA, 22 nt, Artificial sequence
  specific aptamers
ggaagguauggcaugggguagu

SEQ ID NO: 1724 - RNA, 23 nt, Artificial sequence
  specific aptamers
ggaagguauggcaugggguauau

SEQ ID NO: 1725 - RNA, 23 nt, Artificial sequence
  specific aptamers
ggaagguauggcaugggguaucu

SEQ ID NO: 1726 - RNA, 23 nt, Artificial sequence
  specific aptamers
ggaagguauggcaugggguaugu

SEQ ID NO: 1727 - RNA, 23 nt, Artificial sequence
  specific aptamers
ggaagguauggcaugggguauuu

SEQ ID NO: 1728 - RNA, 22 nt, Artificial sequence
  specific aptamers
ggaagguauggcaugggguauu

SEQ ID NO: 1729 - RNA, 23 nt, Artificial sequence
  specific aptamers
ggaagguaugguaugggguaaau

SEQ ID NO: 1730 - RNA, 23 nt, Artificial sequence
  specific aptamers
ggaagguaugguaugggguaacu

SEQ ID NO: 1731 - RNA, 23 nt, Artificial sequence
  specific aptamers
ggaagguaugguaugggguaagu

SEQ ID NO: 1732 - RNA, 23 nt, Artificial sequence
  specific aptamers
ggaagguaugguaugggguaauu

SEQ ID NO: 1733 - RNA, 22 nt, Artificial sequence
  specific aptamers
ggaagguaugguaugggguaau

SEQ ID NO: 1734 - RNA, 23 nt, Artificial sequence
  specific aptamers
ggaagguaugguaugggguacau

SEQ ID NO: 1735 - RNA, 23 nt, Artificial sequence
  specific aptamers
ggaagguaugguaugggguaccu

SEQ ID NO: 1736 - RNA, 23 nt, Artificial sequence
  specific aptamers
ggaagguaugguaugggguacgu

SEQ ID NO: 1737 - RNA, 23 nt, Artificial sequence
  specific aptamers
ggaagguaugguaugggguacuu

SEQ ID NO: 1738 - RNA, 22 nt, Artificial sequence
  specific aptamers
ggaagguaugguaugggguacu

SEQ ID NO: 1739 - RNA, 23 nt, Artificial sequence
  specific aptamers
ggaagguaugguaugggguagau

SEQ ID NO: 1740 - RNA, 23 nt, Artificial sequence
  specific aptamers
ggaagguaugguaugggguagcu

SEQ ID NO: 1741 - RNA, 23 nt, Artificial sequence
  specific aptamers
ggaagguaugguaugggguaggu

SEQ ID NO: 1742 - RNA, 23 nt, Artificial sequence
  specific aptamers
ggaagguaugguaugggguaguu

SEQ ID NO: 1743 - RNA, 22 nt, Artificial sequence
  specific aptamers
ggaagguaugguaugggguagu

SEQ ID NO: 1744 - RNA, 23 nt, Artificial sequence
  specific aptamers
ggaagguaugguaugggguauau

SEQ ID NO: 1745 - RNA, 23 nt, Artificial sequence
  specific aptamers
ggaagguaugguaugggguaucu

SEQ ID NO: 1746 - RNA, 23 nt, Artificial sequence
  specific aptamers
ggaagguaugguaugggguaugu

SEQ ID NO: 1747 - RNA, 23 nt, Artificial sequence
  specific aptamers
ggaagguaugguaugggguauuu

SEQ ID NO: 1748 - RNA, 22 nt, Artificial sequence
  specific aptamers
ggaagguaugguaugggguauu

SEQ ID NO: 1749 - RNA, 23 nt, Artificial sequence
  specific aptamers
ggaagguuuggaaugggguaaau

SEQ ID NO: 1750 - RNA, 23 nt, Artificial sequence
  specific aptamers
ggaagguuuggaaugggguaacu

SEQ ID NO: 1751 - RNA, 23 nt, Artificial sequence
  specific aptamers
ggaagguuuggaaugggguaagu

SEQ ID NO: 1752 - RNA, 23 nt, Artificial sequence
  specific aptamers
ggaagguuuggaaugggguaauu

SEQ ID NO: 1753 - RNA, 22 nt, Artificial sequence
  specific aptamers
ggaagguuuggaaugggguaau

SEQ ID NO: 1754 - RNA, 23 nt, Artificial sequence
  specific aptamers
ggaagguuuggaaugggguacau

SEQ ID NO: 1755 - RNA, 23 nt, Artificial sequence
  specific aptamers
ggaagguuuggaaugggguaccu

SEQ ID NO: 1756 - RNA, 23 nt, Artificial sequence
  specific aptamers
ggaagguuuggaaugggguacgu

SEQ ID NO: 1757 - RNA, 23 nt, Artificial sequence
  specific aptamers
ggaagguuuggaaugggguacuu

SEQ ID NO: 1758 - RNA, 22 nt, Artificial sequence
  specific aptamers
ggaagguuuggaaugggguacu

SEQ ID NO: 1759 - RNA, 23 nt, Artificial sequence
  specific aptamers
ggaagguuuggaaugggguagau

SEQ ID NO: 1760 - RNA, 23 nt, Artificial sequence
  specific aptamers
ggaagguuuggaaugggguagcu

SEQ ID NO: 1761 - RNA, 23 nt, Artificial sequence
  specific aptamers
ggaagguuuggaaugggguaggu

SEQ ID NO: 1762 - RNA, 23 nt, Artificial sequence
  specific aptamers
ggaagguuuggaaugggguaguu

SEQ ID NO: 1763 - RNA, 22 nt, Artificial sequence
  specific aptamers
ggaagguuuggaaugggguagu

SEQ ID NO: 1764 - RNA, 23 nt, Artificial sequence
  specific aptamers
ggaagguuuggaaugggguauau

SEQ ID NO: 1765 - RNA, 23 nt, Artificial sequence
  specific aptamers
ggaagguuuggaaugggguaucu

SEQ ID NO: 1766 - RNA, 23 nt, Artificial sequence
  specific aptamers
ggaagguuuggaaugggguaugu

SEQ ID NO: 1767 - RNA, 23 nt, Artificial sequence
  specific aptamers
ggaagguuuggaaugggguauuu

SEQ ID NO: 1768 - RNA, 22 nt, Artificial sequence
  specific aptamers
ggaagguuuggaaugggguauu

SEQ ID NO: 1769 - RNA, 23 nt, Artificial sequence
  specific aptamers
ggaagguuuggcaugggguaaau

SEQ ID NO: 1770 - RNA, 23 nt, Artificial sequence
  specific aptamers
ggaagguuuggcaugggguaacu

SEQ ID NO: 1771 - RNA, 23 nt, Artificial sequence
  specific aptamers
ggaagguuuggcaugggguaagu

SEQ ID NO: 1772 - RNA, 23 nt, Artificial sequence
  specific aptamers
ggaagguuuggcaugggguaauu

SEQ ID NO: 1773 - RNA, 22 nt, Artificial sequence
  specific aptamers
ggaagguuuggcaugggguaau

SEQ ID NO: 1774 - RNA, 23 nt, Artificial sequence
  specific aptamers
ggaagguuuggcaugggguacau

SEQ ID NO: 1775 - RNA, 23 nt, Artificial sequence
  specific aptamers
ggaagguuuggcaugggguaccu

SEQ ID NO: 1776 - RNA, 23 nt, Artificial sequence
  specific aptamers
ggaagguuuggcaugggguacgu

SEQ ID NO: 1777 - RNA, 23 nt, Artificial sequence
  specific aptamers
ggaagguuuggcaugggguacuu

SEQ ID NO: 1778 - RNA, 22 nt, Artificial sequence
  specific aptamers
ggaagguuuggcaugggguacu

SEQ ID NO: 1779 - RNA, 23 nt, Artificial sequence
  specific aptamers
ggaagguuuggcaugggguagau

SEQ ID NO: 1780 - RNA, 23 nt, Artificial sequence
  specific aptamers
ggaagguuuggcaugggguagcu

SEQ ID NO: 1781 - RNA, 23 nt, Artificial sequence
  specific aptamers
ggaagguuuggcaugggguaggu

SEQ ID NO: 1782 - RNA, 23 nt, Artificial sequence
  specific aptamers
ggaagguuuggcaugggguaguu

SEQ ID NO: 1783 - RNA, 22 nt, Artificial sequence
  specific aptamers
ggaagguuuggcaugggguagu

SEQ ID NO: 1784 - RNA, 23 nt, Artificial sequence
  specific aptamers
ggaagguuuggcaugggguauau

SEQ ID NO: 1785 - RNA, 23 nt, Artificial sequence
  specific aptamers
ggaagguuuggcaugggguaucu

SEQ ID NO: 1786 - RNA, 23 nt, Artificial sequence
  specific aptamers
ggaagguuuggcaugggguaugu

SEQ ID NO: 1787 - RNA, 23 nt, Artificial sequence
  specific aptamers
ggaagguuuggcaugggguauuu

SEQ ID NO: 1788 - RNA, 22 nt, Artificial sequence
  specific aptamers
ggaagguuuggcaugggguauu

SEQ ID NO: 1789 - RNA, 23 nt, Artificial sequence
  specific aptamers
ggaagguuugguaugggguaaau

SEQ ID NO: 1790 - RNA, 23 nt, Artificial sequence
  specific aptamers
ggaagguuugguaugggguaacu

SEQ ID NO: 1791 - RNA, 23 nt, Artificial sequence
  specific aptamers
ggaagguuugguaugggguaagu

SEQ ID NO: 1792 - RNA, 23 nt, Artificial sequence
  specific aptamers
ggaagguuugguaugggguaauu

SEQ ID NO: 1793 - RNA, 22 nt, Artificial sequence
  specific aptamers
ggaagguuugguaugggguaau

SEQ ID NO: 1794 - RNA, 23 nt, Artificial sequence
  specific aptamers
ggaagguuugguaugggguacau

SEQ ID NO: 1795 - RNA, 23 nt, Artificial sequence
  specific aptamers
ggaagguuugguaugggguaccu

SEQ ID NO: 1796 - RNA, 23 nt, Artificial sequence
  specific aptamers
ggaagguuugguaugggguacgu

SEQ ID NO: 1797 - RNA, 23 nt, Artificial sequence
  specific aptamers
ggaagguuugguaugggguacuu

SEQ ID NO: 1798 - RNA, 22 nt, Artificial sequence
  specific aptamers
ggaagguuugguaugggguacu

SEQ ID NO: 1799 - RNA, 23 nt, Artificial sequence
  specific aptamers
ggaagguuugguaugggguagau

SEQ ID NO: 1800 - RNA, 23 nt, Artificial sequence
  specific aptamers
ggaagguuugguaugggguagcu

SEQ ID NO: 1801 - RNA, 23 nt, Artificial sequence
  specific aptamers
ggaagguuugguaugggguaggu

SEQ ID NO: 1802 - RNA, 23 nt, Artificial sequence
  specific aptamers
ggaagguuugguaugggguaguu

SEQ ID NO: 1803 - RNA, 22 nt, Artificial sequence
  specific aptamers
ggaagguuugguaugggguagu

SEQ ID NO: 1804 - RNA, 23 nt, Artificial sequence
  specific aptamers
ggaagguuugguaugggguauau

SEQ ID NO: 1805 - RNA, 23 nt, Artificial sequence
  specific aptamers
ggaagguuugguaugggguaucu

SEQ ID NO: 1806 - RNA, 23 nt, Artificial sequence
  specific aptamers
ggaagguuugguaugggguaugu

SEQ ID NO: 1807 - RNA, 23 nt, Artificial sequence
  specific aptamers
ggaagguuugguaugggguauuu

SEQ ID NO: 1808 - RNA, 22 nt, Artificial sequence
  specific aptamers
ggaagguuugguaugggguauu

SEQ ID NO: 1809 - RNA, 23 nt, Artificial sequence
  specific aptamers
gguagguauggaaugggguaaau

SEQ ID NO: 1810 - RNA, 23 nt, Artificial sequence
  specific aptamers
gguagguauggaaugggguaacu

SEQ ID NO: 1811 - RNA, 23 nt, Artificial sequence
  specific aptamers
gguagguauggaaugggguaagu

SEQ ID NO: 1812 - RNA, 23 nt, Artificial sequence
  specific aptamers
gguagguauggaaugggguaauu

SEQ ID NO: 1813 - RNA, 22 nt, Artificial sequence
  specific aptamers
gguagguauggaaugggguaau

SEQ ID NO: 1814 - RNA, 23 nt, Artificial sequence
  specific aptamers
gguagguauggaaugggguacau

SEQ ID NO: 1815 - RNA, 23 nt, Artificial sequence
  specific aptamers
gguagguauggaaugggguaccu

SEQ ID NO: 1816 - RNA, 23 nt, Artificial sequence
  specific aptamers
gguagguauggaaugggguacgu

SEQ ID NO: 1817 - RNA, 23 nt, Artificial sequence
  specific aptamers
gguagguauggaaugggguacuu

SEQ ID NO: 1818 - RNA, 22 nt, Artificial sequence
  specific aptamers
gguagguauggaaugggguacu

SEQ ID NO: 1819 - RNA, 23 nt, Artificial sequence
  specific aptamers
gguagguauggaaugggguagau

SEQ ID NO: 1820 - RNA, 23 nt, Artificial sequence
  specific aptamers
gguagguauggaaugggguagcu

SEQ ID NO: 1821 - RNA, 23 nt, Artificial sequence
  specific aptamers
gguagguauggaaugggguaggu

SEQ ID NO: 1822 - RNA, 23 nt, Artificial sequence
  specific aptamers
gguagguauggaaugggguaguu

SEQ ID NO: 1823 - RNA, 22 nt, Artificial sequence
  specific aptamers
gguagguauggaaugggguagu

SEQ ID NO: 1824 - RNA, 23 nt, Artificial sequence
  specific aptamers
gguagguauggaaugggguauau

SEQ ID NO: 1825 - RNA, 23 nt, Artificial sequence
  specific aptamers
gguagguauggaaugggguaucu

SEQ ID NO: 1826 - RNA, 23 nt, Artificial sequence
  specific aptamers
gguagguauggaaugggguaugu

SEQ ID NO: 1827 - RNA, 23 nt, Artificial sequence
  specific aptamers
gguagguauggaaugggguauuu

SEQ ID NO: 1828 - RNA, 22 nt, Artificial sequence
  specific aptamers
gguagguauggaaugggguauu

SEQ ID NO: 1829 - RNA, 23 nt, Artificial sequence
  specific aptamers
gguagguauggcaugggguaaau

SEQ ID NO: 1830 - RNA, 23 nt, Artificial sequence
  specific aptamers
gguagguauggcaugggguaacu

SEQ ID NO: 1831 - RNA, 23 nt, Artificial sequence
  specific aptamers
gguagguauggcaugggguaagu

SEQ ID NO: 1832 - RNA, 23 nt, Artificial sequence
  specific aptamers
gguagguauggcaugggguaauu

SEQ ID NO: 1833 - RNA, 22 nt, Artificial sequence
  specific aptamers
gguagguauggcaugggguaau

SEQ ID NO: 1834 - RNA, 23 nt, Artificial sequence
  specific aptamers
gguagguauggcaugggguacau

SEQ ID NO: 1835 - RNA, 23 nt, Artificial sequence
  specific aptamers
gguagguauggcaugggguaccu

SEQ ID NO: 1836 - RNA, 23 nt, Artificial sequence
  specific aptamers
gguagguauggcaugggguacgu

SEQ ID NO: 1837 - RNA, 23 nt, Artificial sequence
  specific aptamers
gguagguauggcaugggguacuu

SEQ ID NO: 1838 - RNA, 22 nt, Artificial sequence
  specific aptamers
gguagguauggcaugggguacu

SEQ ID NO: 1839 - RNA, 23 nt, Artificial sequence
  specific aptamers
gguagguauggcaugggguagau

SEQ ID NO: 1840 - RNA, 23 nt, Artificial sequence
  specific aptamers
gguagguauggcaugggguagcu

SEQ ID NO: 1841 - RNA, 23 nt, Artificial sequence
  specific aptamers
gguagguauggcaugggguaggu

SEQ ID NO: 1842 - RNA, 23 nt, Artificial sequence
  specific aptamers
gguagguauggcaugggguaguu

SEQ ID NO: 1843 - RNA, 22 nt, Artificial sequence
  specific aptamers
gguagguauggcaugggguagu

SEQ ID NO: 1844 - RNA, 23 nt, Artificial sequence
  specific aptamers
gguagguauggcaugggguauau

SEQ ID NO: 1845 - RNA, 23 nt, Artificial sequence
  specific aptamers
gguagguauggcaugggguaucu

SEQ ID NO: 1846 - RNA, 23 nt, Artificial sequence
  specific aptamers
gguagguauggcaugggguaugu

SEQ ID NO: 1847 - RNA, 23 nt, Artificial sequence
  specific aptamers
gguagguauggcaugggguauuu

SEQ ID NO: 1848 - RNA, 22 nt, Artificial sequence
  specific aptamers
gguagguauggcaugggguauu

SEQ ID NO: 1849 - RNA, 23 nt, Artificial sequence
  specific aptamers
gguagguaugguaugggguaaau

SEQ ID NO: 1850 - RNA, 23 nt, Artificial sequence
  specific aptamers
gguagguaugguaugggguaacu

SEQ ID NO: 1851 - RNA, 23 nt, Artificial sequence
  specific aptamers
gguagguaugguaugggguaagu

SEQ ID NO: 1852 - RNA, 23 nt, Artificial sequence
  specific aptamers
gguagguaugguaugggguaauu

SEQ ID NO: 1853 - RNA, 22 nt, Artificial sequence
  specific aptamers
gguagguaugguaugggguaau

SEQ ID NO: 1854 - RNA, 23 nt, Artificial sequence
  specific aptamers
gguagguaugguaugggguacau

SEQ ID NO: 1855 - RNA, 23 nt, Artificial sequence
  specific aptamers
gguagguaugguaugggguaccu

SEQ ID NO: 1856 - RNA, 23 nt, Artificial sequence
  specific aptamers
gguagguaugguaugggguacgu

SEQ ID NO: 1857 - RNA, 23 nt, Artificial sequence
  specific aptamers
gguagguaugguaugggguacuu

SEQ ID NO: 1858 - RNA, 22 nt, Artificial sequence
  specific aptamers
gguagguaugguaugggguacu

SEQ ID NO: 1859 - RNA, 23 nt, Artificial sequence
  specific aptamers
gguagguaugguaugggguagau

SEQ ID NO: 1860 - RNA, 23 nt, Artificial sequence
  specific aptamers
gguagguaugguaugggguagcu

SEQ ID NO: 1861 - RNA, 23 nt, Artificial sequence
  specific aptamers
gguagguaugguaugggguaggu

SEQ ID NO: 1862 - RNA, 23 nt, Artificial sequence
  specific aptamers
gguagguaugguaugggguaguu

SEQ ID NO: 1863 - RNA, 22 nt, Artificial sequence
  specific aptamers
gguagguaugguaugggguagu

SEQ ID NO: 1864 - RNA, 23 nt, Artificial sequence
  specific aptamers
gguagguaugguaugggguauau

SEQ ID NO: 1865 - RNA, 23 nt, Artificial sequence
  specific aptamers
gguagguaugguaugggguaucu

SEQ ID NO: 1866 - RNA, 23 nt, Artificial sequence
  specific aptamers
gguagguaugguaugggguaugu

SEQ ID NO: 1867 - RNA, 23 nt, Artificial sequence
  specific aptamers
gguagguaugguaugggguauuu

SEQ ID NO: 1868 - RNA, 22 nt, Artificial sequence
  specific aptamers
gguagguaugguaugggguauu

SEQ ID NO: 1869 - RNA, 23 nt, Artificial sequence
  specific aptamers
gguagguuuggaaugggguaaau

SEQ ID NO: 1870 - RNA, 23 nt, Artificial sequence
  specific aptamers
gguagguuuggaaugggguaacu

SEQ ID NO: 1871 - RNA, 23 nt, Artificial sequence
  specific aptamers
gguagguuuggaaugggguaagu

SEQ ID NO: 1872 - RNA, 23 nt, Artificial sequence
  specific aptamers
gguagguuuggaaugggguaauu

SEQ ID NO: 1873 - RNA, 22 nt, Artificial sequence
  specific aptamers
gguagguuuggaaugggguaau

SEQ ID NO: 1874 - RNA, 23 nt, Artificial sequence
  specific aptamers
gguagguuuggaaugggguacau

SEQ ID NO: 1875 - RNA, 23 nt, Artificial sequence
  specific aptamers
gguagguuuggaaugggguaccu

SEQ ID NO: 1876 - RNA, 23 nt, Artificial sequence
  specific aptamers
gguagguuuggaaugggguacgu

SEQ ID NO: 1877 - RNA, 23 nt, Artificial sequence
  specific aptamers
gguagguuuggaaugggguacuu

SEQ ID NO: 1878 - RNA, 22 nt, Artificial sequence
  specific aptamers
gguagguuuggaaugggguacu

SEQ ID NO: 1879 - RNA, 23 nt, Artificial sequence
  specific aptamers
gguagguuuggaaugggguagau

SEQ ID NO: 1880 - RNA, 23 nt, Artificial sequence
  specific aptamers
gguagguuuggaaugggguagcu

SEQ ID NO: 1881 - RNA, 23 nt, Artificial sequence
  specific aptamers
gguagguuuggaaugggguaggu

SEQ ID NO: 1882 - RNA, 23 nt, Artificial sequence
  specific aptamers
gguagguuuggaaugggguaguu

SEQ ID NO: 1883 - RNA, 22 nt, Artificial sequence
  specific aptamers
gguagguuuggaaugggguagu

SEQ ID NO: 1884 - RNA, 23 nt, Artificial sequence
  specific aptamers
gguagguuuggaaugggguauau

SEQ ID NO: 1885 - RNA, 23 nt, Artificial sequence
  specific aptamers
gguagguuuggaaugggguaucu

SEQ ID NO: 1886 - RNA, 23 nt, Artificial sequence
  specific aptamers
gguagguuuggaaugggguaugu

SEQ ID NO: 1887 - RNA, 23 nt, Artificial sequence
  specific aptamers
gguagguuuggaaugggguauuu

SEQ ID NO: 1888 - RNA, 22 nt, Artificial sequence
  specific aptamers
gguagguuuggaaugggguauu

SEQ ID NO: 1889 - RNA, 23 nt, Artificial sequence
  specific aptamers
gguagguuuggcaugggguaaau

SEQ ID NO: 1890 - RNA, 23 nt, Artificial sequence
  specific aptamers
gguagguuuggcaugggguaacu

SEQ ID NO: 1891 - RNA, 23 nt, Artificial sequence
  specific aptamers
gguagguuuggcaugggguaagu

SEQ ID NO: 1892 - RNA, 23 nt, Artificial sequence
  specific aptamers
gguagguuuggcaugggguaauu

SEQ ID NO: 1893 - RNA, 22 nt, Artificial sequence
  specific aptamers
gguagguuuggcaugggguaau

SEQ ID NO: 1894 - RNA, 23 nt, Artificial sequence
  specific aptamers
gguagguuuggcaugggguacau

SEQ ID NO: 1895 - RNA, 23 nt, Artificial sequence
  specific aptamers
gguagguuuggcaugggguaccu

SEQ ID NO: 1896 - RNA, 23 nt, Artificial sequence
  specific aptamers
gguagguuuggcaugggguacgu

SEQ ID NO: 1897 - RNA, 23 nt, Artificial sequence
  specific aptamers
gguagguuuggcaugggguacuu

SEQ ID NO: 1898 - RNA, 22 nt, Artificial sequence
  specific aptamers
gguagguuuggcaugggguacu

SEQ ID NO: 1899 - RNA, 23 nt, Artificial sequence
  specific aptamers
gguagguuuggcaugggguagau

SEQ ID NO: 1900 - RNA, 23 nt, Artificial sequence
  specific aptamers
gguagguuuggcaugggguagcu

SEQ ID NO: 1901 - RNA, 23 nt, Artificial sequence
  specific aptamers
gguagguuuggcaugggguaggu

SEQ ID NO: 1902 - RNA, 23 nt, Artificial sequence
  specific aptamers
gguagguuuggcaugggguaguu

SEQ ID NO: 1903 - RNA, 22 nt, Artificial sequence
  specific aptamers
gguagguuuggcaugggguagu

SEQ ID NO: 1904 - RNA, 23 nt, Artificial sequence
  specific aptamers
gguagguuuggcaugggguauau

SEQ ID NO: 1905 - RNA, 23 nt, Artificial sequence
  specific aptamers
gguagguuuggcaugggguaucu

SEQ ID NO: 1906 - RNA, 23 nt, Artificial sequence
  specific aptamers
gguagguuuggcaugggguaugu

SEQ ID NO: 1907 - RNA, 23 nt, Artificial sequence
  specific aptamers
gguagguuuggcaugggguauuu

SEQ ID NO: 1908 - RNA, 22 nt, Artificial sequence
  specific aptamers
gguagguuuggcaugggguauu

SEQ ID NO: 1909 - RNA, 23 nt, Artificial sequence
  specific aptamers
gguagguuugguaugggguaaau

SEQ ID NO: 1910 - RNA, 23 nt, Artificial sequence
  specific aptamers
gguagguuugguaugggguaacu

SEQ ID NO: 1911 - RNA, 23 nt, Artificial sequence
  specific aptamers
gguagguuugguaugggguaagu

SEQ ID NO: 1912 - RNA, 23 nt, Artificial sequence
  specific aptamers
gguagguuugguaugggguaauu

SEQ ID NO: 1913 - RNA, 22 nt, Artificial sequence
  specific aptamers
gguagguuugguaugggguaau

SEQ ID NO: 1914 - RNA, 23 nt, Artificial sequence
  specific aptamers
gguagguuugguaugggguacau

SEQ ID NO: 1915 - RNA, 23 nt, Artificial sequence
  specific aptamers
gguagguuugguaugggguaccu

SEQ ID NO: 1916 - RNA, 23 nt, Artificial sequence
  specific aptamers
gguagguuugguaugggguacgu

SEQ ID NO: 1917 - RNA, 23 nt, Artificial sequence
  specific aptamers
gguagguuugguaugggguacuu

SEQ ID NO: 1918 - RNA, 22 nt, Artificial sequence
  specific aptamers
gguagguuugguaugggguacu

SEQ ID NO: 1919 - RNA, 23 nt, Artificial sequence
  specific aptamers
gguagguuugguaugggguagau

SEQ ID NO: 1920 - RNA, 23 nt, Artificial sequence
  specific aptamers
gguagguuugguaugggguagcu

SEQ ID NO: 1921 - RNA, 23 nt, Artificial sequence
  specific aptamers
gguagguuugguaugggguaggu

SEQ ID NO: 1922 - RNA, 23 nt, Artificial sequence
  specific aptamers
gguagguuugguaugggguaguu

SEQ ID NO: 1923 - RNA, 22 nt, Artificial sequence
  specific aptamers
gguagguuugguaugggguagu

SEQ ID NO: 1924 - RNA, 23 nt, Artificial sequence
  specific aptamers
gguagguuugguaugggguauau

SEQ ID NO: 1925 - RNA, 23 nt, Artificial sequence
  specific aptamers
gguagguuugguaugggguaucu

SEQ ID NO: 1926 - RNA, 23 nt, Artificial sequence
  specific aptamers
gguagguuugguaugggguaugu

SEQ ID NO: 1927 - RNA, 23 nt, Artificial sequence
  specific aptamers
gguagguuugguaugggguauuu

SEQ ID NO: 1928 - RNA, 22 nt, Artificial sequence
  specific aptamers
gguagguuugguaugggguauu

SEQ ID NO: 1929 - RNA, 23 nt, Artificial sequence
  specific aptamers
ggacgguauggaaugugguaaag

SEQ ID NO: 1930 - RNA, 23 nt, Artificial sequence
  specific aptamers
ggacgguauggaaugugguaacg

SEQ ID NO: 1931 - RNA, 23 nt, Artificial sequence
  specific aptamers
ggacgguauggaaugugguaagg

SEQ ID NO: 1932 - RNA, 23 nt, Artificial sequence
  specific aptamers
ggacgguauggaaugugguaaug

SEQ ID NO: 1933 - RNA, 22 nt, Artificial sequence
  specific aptamers
ggacgguauggaaugugguaag

SEQ ID NO: 1934 - RNA, 23 nt, Artificial sequence
  specific aptamers
ggacgguauggaaugugguacag

SEQ ID NO: 1935 - RNA, 23 nt, Artificial sequence
  specific aptamers
ggacgguauggaaugugguaccg

SEQ ID NO: 1936 - RNA, 23 nt, Artificial sequence
  specific aptamers
ggacgguauggaaugugguacgg

SEQ ID NO: 1937 - RNA, 23 nt, Artificial sequence
  specific aptamers
ggacgguauggaaugugguacug

SEQ ID NO: 1938 - RNA, 22 nt, Artificial sequence
  specific aptamers
ggacgguauggaaugugguacg

SEQ ID NO: 1939 - RNA, 23 nt, Artificial sequence
  specific aptamers
ggacgguauggaaugugguagag

SEQ ID NO: 1940 - RNA, 23 nt, Artificial sequence
  specific aptamers
ggacgguauggaaugugguagcg

SEQ ID NO: 1941 - RNA, 23 nt, Artificial sequence
  specific aptamers
ggacgguauggaaugugguaggg

SEQ ID NO: 1942 - RNA, 23 nt, Artificial sequence
  specific aptamers
ggacgguauggaaugugguagug

SEQ ID NO: 1943 - RNA, 22 nt, Artificial sequence
  specific aptamers
ggacgguauggaaugugguagg

SEQ ID NO: 1944 - RNA, 23 nt, Artificial sequence
  specific aptamers
ggacgguauggaaugugguauag

SEQ ID NO: 1945 - RNA, 23 nt, Artificial sequence
  specific aptamers
ggacgguauggaaugugguaucg

SEQ ID NO: 1946 - RNA, 23 nt, Artificial sequence
  specific aptamers
ggacgguauggaaugugguaugg

SEQ ID NO: 1947 - RNA, 23 nt, Artificial sequence
  specific aptamers
ggacgguauggaaugugguauug

SEQ ID NO: 1948 - RNA, 22 nt, Artificial sequence
  specific aptamers
ggacgguauggaaugugguaug

SEQ ID NO: 1949 - RNA, 23 nt, Artificial sequence
  specific aptamers
ggacgguauggcaugugguaaag

SEQ ID NO: 1950 - RNA, 23 nt, Artificial sequence
  specific aptamers
ggacgguauggcaugugguaacg

SEQ ID NO: 1951 - RNA, 23 nt, Artificial sequence
  specific aptamers
ggacgguauggcaugugguaagg

SEQ ID NO: 1952 - RNA, 23 nt, Artificial sequence
  specific aptamers
ggacgguauggcaugugguaaug

SEQ ID NO: 1953 - RNA, 22 nt, Artificial sequence
  specific aptamers
ggacgguauggcaugugguaag

SEQ ID NO: 1954 - RNA, 23 nt, Artificial sequence
  specific aptamers
ggacgguauggcaugugguacag

SEQ ID NO: 1955 - RNA, 23 nt, Artificial sequence
  specific aptamers
ggacgguauggcaugugguaccg

SEQ ID NO: 1956 - RNA, 23 nt, Artificial sequence
  specific aptamers
ggacgguauggcaugugguacgg

SEQ ID NO: 1957 - RNA, 23 nt, Artificial sequence
  specific aptamers
ggacgguauggcaugugguacug

SEQ ID NO: 1958 - RNA, 22 nt, Artificial sequence
  specific aptamers
ggacgguauggcaugugguacg

SEQ ID NO: 1959 - RNA, 23 nt, Artificial sequence
  specific aptamers
ggacgguauggcaugugguagag

SEQ ID NO: 1960 - RNA, 23 nt, Artificial sequence
  specific aptamers
ggacgguauggcaugugguagcg

SEQ ID NO: 1961 - RNA, 23 nt, Artificial sequence
  specific aptamers
ggacgguauggcaugugguaggg

SEQ ID NO: 1962 - RNA, 23 nt, Artificial sequence
  specific aptamers
ggacgguauggcaugugguagug

SEQ ID NO: 1963 - RNA, 22 nt, Artificial sequence
  specific aptamers
ggacgguauggcaugugguagg

SEQ ID NO: 1964 - RNA, 23 nt, Artificial sequence
  specific aptamers
ggacgguauggcaugugguauag

SEQ ID NO: 1965 - RNA, 23 nt, Artificial sequence
  specific aptamers
ggacgguauggcaugugguaucg

SEQ ID NO: 1966 - RNA, 23 nt, Artificial sequence
  specific aptamers
ggacgguauggcaugugguaugg

SEQ ID NO: 1967 - RNA, 23 nt, Artificial sequence
  specific aptamers
ggacgguauggcaugugguauug

SEQ ID NO: 1968 - RNA, 22 nt, Artificial sequence
  specific aptamers
ggacgguauggcaugugguaug

SEQ ID NO: 1969 - RNA, 23 nt, Artificial sequence
  specific aptamers
ggacgguaugguaugugguaaag

SEQ ID NO: 1970 - RNA, 23 nt, Artificial sequence
  specific aptamers
ggacgguaugguaugugguaacg

SEQ ID NO: 1971 - RNA, 23 nt, Artificial sequence
  specific aptamers
ggacgguaugguaugugguaagg

SEQ ID NO: 1972 - RNA, 23 nt, Artificial sequence
  specific aptamers
ggacgguaugguaugugguaaug

SEQ ID NO: 1973 - RNA, 22 nt, Artificial sequence
  specific aptamers
ggacgguaugguaugugguaag

SEQ ID NO: 1974 - RNA, 23 nt, Artificial sequence
  specific aptamers
ggacgguaugguaugugguacag

SEQ ID NO: 1975 - RNA, 23 nt, Artificial sequence
  specific aptamers
ggacgguaugguaugugguaccg

SEQ ID NO: 1976 - RNA, 23 nt, Artificial sequence
  specific aptamers
ggacgguaugguaugugguacgg

SEQ ID NO: 1977 - RNA, 23 nt, Artificial sequence
  specific aptamers
ggacgguaugguaugugguacug

SEQ ID NO: 1978 - RNA, 22 nt, Artificial sequence
  specific aptamers
ggacgguaugguaugugguacg

SEQ ID NO: 1979 - RNA, 23 nt, Artificial sequence
  specific aptamers
ggacgguaugguaugugguagag

SEQ ID NO: 1980 - RNA, 23 nt, Artificial sequence
  specific aptamers
ggacgguaugguaugugguagcg

SEQ ID NO: 1981 - RNA, 23 nt, Artificial sequence
  specific aptamers
ggacgguaugguaugugguaggg

SEQ ID NO: 1982 - RNA, 23 nt, Artificial sequence
  specific aptamers
ggacgguaugguaugugguagug

SEQ ID NO: 1983 - RNA, 22 nt, Artificial sequence
  specific aptamers
ggacgguaugguaugugguagg

SEQ ID NO: 1984 - RNA, 23 nt, Artificial sequence
  specific aptamers
ggacgguaugguaugugguauag

SEQ ID NO: 1985 - RNA, 23 nt, Artificial sequence
  specific aptamers
ggacgguaugguaugugguaucg

SEQ ID NO: 1986 - RNA, 23 nt, Artificial sequence
  specific aptamers
ggacgguaugguaugugguaugg

SEQ ID NO: 1987 - RNA, 23 nt, Artificial sequence
  specific aptamers
ggacgguaugguaugugguauug

SEQ ID NO: 1988 - RNA, 22 nt, Artificial sequence
  specific aptamers
ggacgguaugguaugugguaug

SEQ ID NO: 1989 - RNA, 23 nt, Artificial sequence
  specific aptamers
ggacgguuuggaaugugguaaag

SEQ ID NO: 1990 - RNA, 23 nt, Artificial sequence
  specific aptamers
ggacgguuuggaaugugguaacg

SEQ ID NO: 1991 - RNA, 23 nt, Artificial sequence
  specific aptamers
ggacgguuuggaaugugguaagg

SEQ ID NO: 1992 - RNA, 23 nt, Artificial sequence
  specific aptamers
ggacgguuuggaaugugguaaug

SEQ ID NO: 1993 - RNA, 22 nt, Artificial sequence
  specific aptamers
ggacgguuuggaaugugguaag

SEQ ID NO: 1994 - RNA, 23 nt, Artificial sequence
  specific aptamers
ggacgguuuggaaugugguacag

SEQ ID NO: 1995 - RNA, 23 nt, Artificial sequence
  specific aptamers
ggacgguuuggaaugugguaccg

SEQ ID NO: 1996 - RNA, 23 nt, Artificial sequence
  specific aptamers
ggacgguuuggaaugugguacgg

SEQ ID NO: 1997 - RNA, 23 nt, Artificial sequence
  specific aptamers
ggacgguuuggaaugugguacug

SEQ ID NO: 1998 - RNA, 22 nt, Artificial sequence
  specific aptamers
ggacgguuuggaaugugguacg

SEQ ID NO: 1999 - RNA, 23 nt, Artificial sequence
  specific aptamers
ggacgguuuggaaugugguagag

SEQ ID NO: 2000 - RNA, 23 nt, Artificial sequence
  specific aptamers
ggacgguuuggaaugugguagcg

SEQ ID NO: 2001 - RNA, 23 nt, Artificial sequence
  specific aptamers
ggacgguuuggaaugugguaggg

SEQ ID NO: 2002 - RNA, 23 nt, Artificial sequence
  specific aptamers
ggacgguuuggaaugugguagug

SEQ ID NO: 2003 - RNA, 22 nt, Artificial sequence
  specific aptamers
ggacgguuuggaaugugguagg

SEQ ID NO: 2004 - RNA, 23 nt, Artificial sequence
  specific aptamers
ggacgguuuggaaugugguauag

SEQ ID NO: 2005 - RNA, 23 nt, Artificial sequence
  specific aptamers
ggacgguuuggaaugugguaucg

SEQ ID NO: 2006 - RNA, 23 nt, Artificial sequence
  specific aptamers
ggacgguuuggaaugugguaugg

SEQ ID NO: 2007 - RNA, 23 nt, Artificial sequence
  specific aptamers
ggacgguuuggaaugugguauug

SEQ ID NO: 2008 - RNA, 22 nt, Artificial sequence
  specific aptamers
ggacgguuuggaaugugguaug

SEQ ID NO: 2009 - RNA, 23 nt, Artificial sequence
  specific aptamers
ggacgguuuggcaugugguaaag

SEQ ID NO: 2010 - RNA, 23 nt, Artificial sequence
  specific aptamers
ggacgguuuggcaugugguaacg

SEQ ID NO: 2011 - RNA, 23 nt, Artificial sequence
  specific aptamers
ggacgguuuggcaugugguaagg

SEQ ID NO: 2012 - RNA, 23 nt, Artificial sequence
  specific aptamers
ggacgguuuggcaugugguaaug

SEQ ID NO: 2013 - RNA, 22 nt, Artificial sequence
  specific aptamers
ggacgguuuggcaugugguaag

SEQ ID NO: 2014 - RNA, 23 nt, Artificial sequence
  specific aptamers
ggacgguuuggcaugugguacag

SEQ ID NO: 2015 - RNA, 23 nt, Artificial sequence
  specific aptamers
ggacgguuuggcaugugguaccg

SEQ ID NO: 2016 - RNA, 23 nt, Artificial sequence
  specific aptamers
ggacgguuuggcaugugguacgg

SEQ ID NO: 2017 - RNA, 23 nt, Artificial sequence
  specific aptamers
ggacgguuuggcaugugguacug

SEQ ID NO: 2018 - RNA, 22 nt, Artificial sequence
  specific aptamers
ggacgguuuggcaugugguacg

SEQ ID NO: 2019 - RNA, 23 nt, Artificial sequence
  specific aptamers
ggacgguuuggcaugugguagag

SEQ ID NO: 2020 - RNA, 23 nt, Artificial sequence
  specific aptamers
ggacgguuuggcaugugguagcg

SEQ ID NO: 2021 - RNA, 23 nt, Artificial sequence
  specific aptamers
ggacgguuuggcaugugguaggg

SEQ ID NO: 2022 - RNA, 23 nt, Artificial sequence
  specific aptamers
ggacgguuuggcaugugguagug

SEQ ID NO: 2023 - RNA, 22 nt, Artificial sequence
  specific aptamers
ggacgguuuggcaugugguagg

SEQ ID NO: 2024 - RNA, 23 nt, Artificial sequence
  specific aptamers
ggacgguuuggcaugugguauag

SEQ ID NO: 2025 - RNA, 23 nt, Artificial sequence
  specific aptamers
ggacgguuuggcaugugguaucg

SEQ ID NO: 2026 - RNA, 23 nt, Artificial sequence
  specific aptamers
ggacgguuuggcaugugguaugg

SEQ ID NO: 2027 - RNA, 23 nt, Artificial sequence
  specific aptamers
ggacgguuuggcaugugguauug

SEQ ID NO: 2028 - RNA, 22 nt, Artificial sequence
  specific aptamers
ggacgguuuggcaugugguaug

SEQ ID NO: 2029 - RNA, 23 nt, Artificial sequence
  specific aptamers
ggacgguuugguaugugguaaag

SEQ ID NO: 2030 - RNA, 23 nt, Artificial sequence
  specific aptamers
ggacgguuugguaugugguaacg

SEQ ID NO: 2031 - RNA, 23 nt, Artificial sequence
  specific aptamers
ggacgguuugguaugugguaagg

SEQ ID NO: 2032 - RNA, 23 nt, Artificial sequence
  specific aptamers
ggacgguuugguaugugguaaug

SEQ ID NO: 2033 - RNA, 22 nt, Artificial sequence
  specific aptamers
ggacgguuugguaugugguaag

SEQ ID NO: 2034 - RNA, 23 nt, Artificial sequence
  specific aptamers
ggacgguuugguaugugguacag

SEQ ID NO: 2035 - RNA, 23 nt, Artificial sequence
  specific aptamers
ggacgguuugguaugugguaccg

SEQ ID NO: 2036 - RNA, 23 nt, Artificial sequence
  specific aptamers
ggacgguuugguaugugguacgg

SEQ ID NO: 2037 - RNA, 23 nt, Artificial sequence
  specific aptamers
ggacgguuugguaugugguacug

SEQ ID NO: 2038 - RNA, 22 nt, Artificial sequence
  specific aptamers
ggacgguuugguaugugguacg

SEQ ID NO: 2039 - RNA, 23 nt, Artificial sequence
  specific aptamers
ggacgguuugguaugugguagag

SEQ ID NO: 2040 - RNA, 23 nt, Artificial sequence
  specific aptamers
ggacgguuugguaugugguagcg

SEQ ID NO: 2041 - RNA, 23 nt, Artificial sequence
  specific aptamers
ggacgguuugguaugugguaggg

SEQ ID NO: 2042 - RNA, 23 nt, Artificial sequence
  specific aptamers
ggacgguuugguaugugguagug

SEQ ID NO: 2043 - RNA, 22 nt, Artificial sequence
  specific aptamers
ggacgguuugguaugugguagg

SEQ ID NO: 2044 - RNA, 23 nt, Artificial sequence
  specific aptamers
ggacgguuugguaugugguauag

SEQ ID NO: 2045 - RNA, 23 nt, Artificial sequence
  specific aptamers
ggacgguuugguaugugguaucg

SEQ ID NO: 2046 - RNA, 23 nt, Artificial sequence
  specific aptamers
ggacgguuugguaugugguaugg

SEQ ID NO: 2047 - RNA, 23 nt, Artificial sequence
  specific aptamers
ggacgguuugguaugugguauug

SEQ ID NO: 2048 - RNA, 22 nt, Artificial sequence
  specific aptamers
ggacgguuugguaugugguaug

SEQ ID NO: 2049 - RNA, 23 nt, Artificial sequence
  specific aptamers
ggucgguauggaaugugguaaag

SEQ ID NO: 2050 - RNA, 23 nt, Artificial sequence
  specific aptamers
ggucgguauggaaugugguaacg

SEQ ID NO: 2051 - RNA, 23 nt, Artificial sequence
  specific aptamers
ggucgguauggaaugugguaagg

SEQ ID NO: 2052 - RNA, 23 nt, Artificial sequence
  specific aptamers
ggucgguauggaaugugguaaug

SEQ ID NO: 2053 - RNA, 22 nt, Artificial sequence
  specific aptamers
ggucgguauggaaugugguaag

SEQ ID NO: 2054 - RNA, 23 nt, Artificial sequence
  specific aptamers
ggucgguauggaaugugguacag

SEQ ID NO: 2055 - RNA, 23 nt, Artificial sequence
  specific aptamers
ggucgguauggaaugugguaccg

SEQ ID NO: 2056 - RNA, 23 nt, Artificial sequence
  specific aptamers
ggucgguauggaaugugguacgg

SEQ ID NO: 2057 - RNA, 23 nt, Artificial sequence
  specific aptamers
ggucgguauggaaugugguacug

SEQ ID NO: 2058 - RNA, 22 nt, Artificial sequence
  specific aptamers
ggucgguauggaaugugguacg

SEQ ID NO: 2059 - RNA, 23 nt, Artificial sequence
  specific aptamers
ggucgguauggaaugugguagag

SEQ ID NO: 2060 - RNA, 23 nt, Artificial sequence
  specific aptamers
ggucgguauggaaugugguagcg

SEQ ID NO: 2061 - RNA, 23 nt, Artificial sequence
  specific aptamers
ggucgguauggaaugugguaggg

SEQ ID NO: 2062 - RNA, 23 nt, Artificial sequence
  specific aptamers
ggucgguauggaaugugguagug

SEQ ID NO: 2063 - RNA, 22 nt, Artificial sequence
  specific aptamers
ggucgguauggaaugugguagg

SEQ ID NO: 2064 - RNA, 23 nt, Artificial sequence
  specific aptamers
ggucgguauggaaugugguauag

SEQ ID NO: 2065 - RNA, 23 nt, Artificial sequence
  specific aptamers
ggucgguauggaaugugguaucg

SEQ ID NO: 2066 - RNA, 23 nt, Artificial sequence
  specific aptamers
ggucgguauggaaugugguaugg

SEQ ID NO: 2067 - RNA, 23 nt, Artificial sequence
  specific aptamers
ggucgguauggaaugugguauug

SEQ ID NO: 2068 - RNA, 22 nt, Artificial sequence
  specific aptamers
ggucgguauggaaugugguaug

SEQ ID NO: 2069 - RNA, 23 nt, Artificial sequence
  specific aptamers
ggucgguauggcaugugguaaag

SEQ ID NO: 2070 - RNA, 23 nt, Artificial sequence
  specific aptamers
ggucgguauggcaugugguaacg

SEQ ID NO: 2071 - RNA, 23 nt, Artificial sequence
  specific aptamers
ggucgguauggcaugugguaagg

SEQ ID NO: 2072 - RNA, 23 nt, Artificial sequence
  specific aptamers
ggucgguauggcaugugguaaug

SEQ ID NO: 2073 - RNA, 22 nt, Artificial sequence
  specific aptamers
ggucgguauggcaugugguaag

SEQ ID NO: 2074 - RNA, 23 nt, Artificial sequence
  specific aptamers
ggucgguauggcaugugguacag

SEQ ID NO: 2075 - RNA, 23 nt, Artificial sequence
  specific aptamers
ggucgguauggcaugugguaccg

SEQ ID NO: 2076 - RNA, 23 nt, Artificial sequence
  specific aptamers
ggucgguauggcaugugguacgg

SEQ ID NO: 2077 - RNA, 23 nt, Artificial sequence
  specific aptamers
ggucgguauggcaugugguacug

SEQ ID NO: 2078 - RNA, 22 nt, Artificial sequence
  specific aptamers
ggucgguauggcaugugguacg

SEQ ID NO: 2079 - RNA, 23 nt, Artificial sequence
  specific aptamers
ggucgguauggcaugugguagag

SEQ ID NO: 2080 - RNA, 23 nt, Artificial sequence
  specific aptamers
ggucgguauggcaugugguagcg

SEQ ID NO: 2081 - RNA, 23 nt, Artificial sequence
  specific aptamers
ggucgguauggcaugugguaggg

SEQ ID NO: 2082 - RNA, 23 nt, Artificial sequence
  specific aptamers
ggucgguauggcaugugguagug

SEQ ID NO: 2083 - RNA, 22 nt, Artificial sequence
  specific aptamers
ggucgguauggcaugugguagg

SEQ ID NO: 2084 - RNA, 23 nt, Artificial sequence
  specific aptamers
ggucgguauggcaugugguauag

SEQ ID NO: 2085 - RNA, 23 nt, Artificial sequence
  specific aptamers
ggucgguauggcaugugguaucg

SEQ ID NO: 2086 - RNA, 23 nt, Artificial sequence
  specific aptamers
ggucgguauggcaugugguaugg

SEQ ID NO: 2087 - RNA, 23 nt, Artificial sequence
  specific aptamers
ggucgguauggcaugugguauug

SEQ ID NO: 2088 - RNA, 22 nt, Artificial sequence
  specific aptamers
ggucgguauggcaugugguaug

SEQ ID NO: 2089 - RNA, 23 nt, Artificial sequence
  specific aptamers
ggucgguaugguaugugguaaag

SEQ ID NO: 2090 - RNA, 23 nt, Artificial sequence
  specific aptamers
ggucgguaugguaugugguaacg

SEQ ID NO: 2091 - RNA, 23 nt, Artificial sequence
  specific aptamers
ggucgguaugguaugugguaagg

SEQ ID NO: 2092 - RNA, 23 nt, Artificial sequence
  specific aptamers
ggucgguaugguaugugguaaug

SEQ ID NO: 2093 - RNA, 22 nt, Artificial sequence
  specific aptamers
ggucgguaugguaugugguaag

SEQ ID NO: 2094 - RNA, 23 nt, Artificial sequence
  specific aptamers
ggucgguaugguaugugguacag

SEQ ID NO: 2095 - RNA, 23 nt, Artificial sequence
  specific aptamers
ggucgguaugguaugugguaccg

SEQ ID NO: 2096 - RNA, 23 nt, Artificial sequence
  specific aptamers
ggucgguaugguaugugguacgg

SEQ ID NO: 2097 - RNA, 23 nt, Artificial sequence
  specific aptamers
ggucgguaugguaugugguacug

SEQ ID NO: 2098 - RNA, 22 nt, Artificial sequence
  specific aptamers
ggucgguaugguaugugguacg

SEQ ID NO: 2099 - RNA, 23 nt, Artificial sequence
  specific aptamers
ggucgguaugguaugugguagag

SEQ ID NO: 2100 - RNA, 23 nt, Artificial sequence
  specific aptamers
ggucgguaugguaugugguagcg

SEQ ID NO: 2101 - RNA, 23 nt, Artificial sequence
  specific aptamers
ggucgguaugguaugugguaggg

SEQ ID NO: 2102 - RNA, 23 nt, Artificial sequence
  specific aptamers
ggucgguaugguaugugguagug

SEQ ID NO: 2103 - RNA, 22 nt, Artificial sequence
  specific aptamers
ggucgguaugguaugugguagg

SEQ ID NO: 2104 - RNA, 23 nt, Artificial sequence
  specific aptamers
ggucgguaugguaugugguauag

SEQ ID NO: 2105 - RNA, 23 nt, Artificial sequence
  specific aptamers
ggucgguaugguaugugguaucg

SEQ ID NO: 2106 - RNA, 23 nt, Artificial sequence
  specific aptamers
ggucgguaugguaugugguaugg

SEQ ID NO: 2107 - RNA, 23 nt, Artificial sequence
  specific aptamers
ggucgguaugguaugugguauug

SEQ ID NO: 2108 - RNA, 22 nt, Artificial sequence
  specific aptamers
ggucgguaugguaugugguaug

SEQ ID NO: 2109 - RNA, 23 nt, Artificial sequence
  specific aptamers
ggucgguuuggaaugugguaaag

SEQ ID NO: 2110 - RNA, 23 nt, Artificial sequence
  specific aptamers
ggucgguuuggaaugugguaacg

SEQ ID NO: 2111 - RNA, 23 nt, Artificial sequence
  specific aptamers
ggucgguuuggaaugugguaagg

SEQ ID NO: 2112 - RNA, 23 nt, Artificial sequence
  specific aptamers
ggucgguuuggaaugugguaaug

SEQ ID NO: 2113 - RNA, 22 nt, Artificial sequence
  specific aptamers
ggucgguuuggaaugugguaag

SEQ ID NO: 2114 - RNA, 23 nt, Artificial sequence
  specific aptamers
ggucgguuuggaaugugguacag

SEQ ID NO: 2115 - RNA, 23 nt, Artificial sequence
  specific aptamers
ggucgguuuggaaugugguaccg

SEQ ID NO: 2116 - RNA, 23 nt, Artificial sequence
  specific aptamers
ggucgguuuggaaugugguacgg

SEQ ID NO: 2117 - RNA, 23 nt, Artificial sequence
  specific aptamers
ggucgguuuggaaugugguacug

SEQ ID NO: 2118 - RNA, 22 nt, Artificial sequence
  specific aptamers
ggucgguuuggaaugugguacg

SEQ ID NO: 2119 - RNA, 23 nt, Artificial sequence
  specific aptamers
ggucgguuuggaaugugguagag

SEQ ID NO: 2120 - RNA, 23 nt, Artificial sequence
  specific aptamers
ggucgguuuggaaugugguagcg

SEQ ID NO: 2121 - RNA, 23 nt, Artificial sequence
  specific aptamers
ggucgguuuggaaugugguaggg

SEQ ID NO: 2122 - RNA, 23 nt, Artificial sequence
  specific aptamers
ggucgguuuggaaugugguagug

SEQ ID NO: 2123 - RNA, 22 nt, Artificial sequence
  specific aptamers
ggucgguuuggaaugugguagg

SEQ ID NO: 2124 - RNA, 23 nt, Artificial sequence
  specific aptamers
ggucgguuuggaaugugguauag

SEQ ID NO: 2125 - RNA, 23 nt, Artificial sequence
  specific aptamers
ggucgguuuggaaugugguaucg

SEQ ID NO: 2126 - RNA, 23 nt, Artificial sequence
  specific aptamers
ggucgguuuggaaugugguaugg

SEQ ID NO: 2127 - RNA, 23 nt, Artificial sequence
  specific aptamers
ggucgguuuggaaugugguauug

SEQ ID NO: 2128 - RNA, 22 nt, Artificial sequence
  specific aptamers
ggucgguuuggaaugugguaug

SEQ ID NO: 2129 - RNA, 23 nt, Artificial sequence
  specific aptamers
ggucgguuuggcaugugguaaag

SEQ ID NO: 2130 - RNA, 23 nt, Artificial sequence
  specific aptamers
ggucgguuuggcaugugguaacg

SEQ ID NO: 2131 - RNA, 23 nt, Artificial sequence
  specific aptamers
ggucgguuuggcaugugguaagg

SEQ ID NO: 2132 - RNA, 23 nt, Artificial sequence
  specific aptamers
ggucgguuuggcaugugguaaug

SEQ ID NO: 2133 - RNA, 22 nt, Artificial sequence
  specific aptamers
ggucgguuuggcaugugguaag

SEQ ID NO: 2134 - RNA, 23 nt, Artificial sequence
  specific aptamers
ggucgguuuggcaugugguacag

SEQ ID NO: 2135 - RNA, 23 nt, Artificial sequence
  specific aptamers
ggucgguuuggcaugugguaccg

SEQ ID NO: 2136 - RNA, 23 nt, Artificial sequence
  specific aptamers
ggucgguuuggcaugugguacgg

SEQ ID NO: 2137 - RNA, 23 nt, Artificial sequence
  specific aptamers
ggucgguuuggcaugugguacug

SEQ ID NO: 2138 - RNA, 22 nt, Artificial sequence
  specific aptamers
ggucgguuuggcaugugguacg

SEQ ID NO: 2139 - RNA, 23 nt, Artificial sequence
  specific aptamers
ggucgguuuggcaugugguagag

SEQ ID NO: 2140 - RNA, 23 nt, Artificial sequence
  specific aptamers
ggucgguuuggcaugugguagcg

SEQ ID NO: 2141 - RNA, 23 nt, Artificial sequence
  specific aptamers
ggucgguuuggcaugugguaggg

SEQ ID NO: 2142 - RNA, 23 nt, Artificial sequence
  specific aptamers
ggucgguuuggcaugugguagug

SEQ ID NO: 2143 - RNA, 22 nt, Artificial sequence
  specific aptamers
ggucgguuuggcaugugguagg

SEQ ID NO: 2144 - RNA, 23 nt, Artificial sequence
  specific aptamers
ggucgguuuggcaugugguauag

SEQ ID NO: 2145 - RNA, 23 nt, Artificial sequence
  specific aptamers
ggucgguuuggcaugugguaucg

SEQ ID NO: 2146 - RNA, 23 nt, Artificial sequence
  specific aptamers
ggucgguuuggcaugugguaugg

SEQ ID NO: 2147 - RNA, 23 nt, Artificial sequence
  specific aptamers
ggucgguuuggcaugugguauug

SEQ ID NO: 2148 - RNA, 22 nt, Artificial sequence
  specific aptamers
ggucgguuuggcaugugguaug

SEQ ID NO: 2149 - RNA, 23 nt, Artificial sequence
  specific aptamers
ggucgguuugguaugugguaaag

SEQ ID NO: 2150 - RNA, 23 nt, Artificial sequence
  specific aptamers
ggucgguuugguaugugguaacg

SEQ ID NO: 2151 - RNA, 23 nt, Artificial sequence
  specific aptamers
ggucgguuugguaugugguaagg

SEQ ID NO: 2152 - RNA, 23 nt, Artificial sequence
  specific aptamers
ggucgguuugguaugugguaaug

SEQ ID NO: 2153 - RNA, 22 nt, Artificial sequence
  specific aptamers
ggucgguuugguaugugguaag

SEQ ID NO: 2154 - RNA, 23 nt, Artificial sequence
  specific aptamers
ggucgguuugguaugugguacag

SEQ ID NO: 2155 - RNA, 23 nt, Artificial sequence
  specific aptamers
ggucgguuugguaugugguaccg

SEQ ID NO: 2156 - RNA, 23 nt, Artificial sequence
  specific aptamers
ggucgguuugguaugugguacgg

SEQ ID NO: 2157 - RNA, 23 nt, Artificial sequence
  specific aptamers
ggucgguuugguaugugguacug

SEQ ID NO: 2158 - RNA, 22 nt, Artificial sequence
  specific aptamers
ggucgguuugguaugugguacg

SEQ ID NO: 2159 - RNA, 23 nt, Artificial sequence
  specific aptamers
ggucgguuugguaugugguagag

SEQ ID NO: 2160 - RNA, 23 nt, Artificial sequence
  specific aptamers
ggucgguuugguaugugguagcg

SEQ ID NO: 2161 - RNA, 23 nt, Artificial sequence
  specific aptamers
ggucgguuugguaugugguaggg

SEQ ID NO: 2162 - RNA, 23 nt, Artificial sequence
  specific aptamers
ggucgguuugguaugugguagug

SEQ ID NO: 2163 - RNA, 22 nt, Artificial sequence
  specific aptamers
ggucgguuugguaugugguagg

SEQ ID NO: 2164 - RNA, 23 nt, Artificial sequence
  specific aptamers
ggucgguuugguaugugguauag

SEQ ID NO: 2165 - RNA, 23 nt, Artificial sequence
  specific aptamers
ggucgguuugguaugugguaucg

SEQ ID NO: 2166 - RNA, 23 nt, Artificial sequence
  specific aptamers
ggucgguuugguaugugguaugg

SEQ ID NO: 2167 - RNA, 23 nt, Artificial sequence
  specific aptamers
ggucgguuugguaugugguauug

SEQ ID NO: 2168 - RNA, 22 nt, Artificial sequence
  specific aptamers
ggucgguuugguaugugguaug

SEQ ID NO: 2169 - RNA, 23 nt, Artificial sequence
  specific aptamers
ggaagguauggaaugagguaaau

SEQ ID NO: 2170 - RNA, 23 nt, Artificial sequence
  specific aptamers
ggaagguauggaaugagguaacu

SEQ ID NO: 2171 - RNA, 23 nt, Artificial sequence
  specific aptamers
ggaagguauggaaugagguaagu

SEQ ID NO: 2172 - RNA, 23 nt, Artificial sequence
  specific aptamers
ggaagguauggaaugagguaauu

SEQ ID NO: 2173 - RNA, 22 nt, Artificial sequence
  specific aptamers
ggaagguauggaaugagguaau

SEQ ID NO: 2174 - RNA, 23 nt, Artificial sequence
  specific aptamers
ggaagguauggaaugagguacau

SEQ ID NO: 2175 - RNA, 23 nt, Artificial sequence
  specific aptamers
ggaagguauggaaugagguaccu

SEQ ID NO: 2176 - RNA, 23 nt, Artificial sequence
  specific aptamers
ggaagguauggaaugagguacgu

SEQ ID NO: 2177 - RNA, 23 nt, Artificial sequence
  specific aptamers
ggaagguauggaaugagguacuu

SEQ ID NO: 2178 - RNA, 22 nt, Artificial sequence
  specific aptamers
ggaagguauggaaugagguacu

SEQ ID NO: 2179 - RNA, 23 nt, Artificial sequence
  specific aptamers
ggaagguauggaaugagguagau

SEQ ID NO: 2180 - RNA, 23 nt, Artificial sequence
  specific aptamers
ggaagguauggaaugagguagcu

SEQ ID NO: 2181 - RNA, 23 nt, Artificial sequence
  specific aptamers
ggaagguauggaaugagguaggu

SEQ ID NO: 2182 - RNA, 23 nt, Artificial sequence
  specific aptamers
ggaagguauggaaugagguaguu

SEQ ID NO: 2183 - RNA, 22 nt, Artificial sequence
  specific aptamers
ggaagguauggaaugagguagu

SEQ ID NO: 2184 - RNA, 23 nt, Artificial sequence
  specific aptamers
ggaagguauggaaugagguauau

SEQ ID NO: 2185 - RNA, 23 nt, Artificial sequence
  specific aptamers
ggaagguauggaaugagguaucu

SEQ ID NO: 2186 - RNA, 23 nt, Artificial sequence
  specific aptamers
ggaagguauggaaugagguaugu

SEQ ID NO: 2187 - RNA, 23 nt, Artificial sequence
  specific aptamers
ggaagguauggaaugagguauuu

SEQ ID NO: 2188 - RNA, 22 nt, Artificial sequence
  specific aptamers
ggaagguauggaaugagguauu

SEQ ID NO: 2189 - RNA, 23 nt, Artificial sequence
  specific aptamers
ggaagguauggcaugagguaaau

SEQ ID NO: 2190 - RNA, 23 nt, Artificial sequence
  specific aptamers
ggaagguauggcaugagguaacu

SEQ ID NO: 2191 - RNA, 23 nt, Artificial sequence
  specific aptamers
ggaagguauggcaugagguaagu

SEQ ID NO: 2192 - RNA, 23 nt, Artificial sequence
  specific aptamers
ggaagguauggcaugagguaauu

SEQ ID NO: 2193 - RNA, 22 nt, Artificial sequence
  specific aptamers
ggaagguauggcaugagguaau

SEQ ID NO: 2194 - RNA, 23 nt, Artificial sequence
  specific aptamers
ggaagguauggcaugagguacau

SEQ ID NO: 2195 - RNA, 23 nt, Artificial sequence
  specific aptamers
ggaagguauggcaugagguaccu

SEQ ID NO: 2196 - RNA, 23 nt, Artificial sequence
  specific aptamers
ggaagguauggcaugagguacgu

SEQ ID NO: 2197 - RNA, 23 nt, Artificial sequence
  specific aptamers
ggaagguauggcaugagguacuu

SEQ ID NO: 2198 - RNA, 22 nt, Artificial sequence
  specific aptamers
ggaagguauggcaugagguacu

SEQ ID NO: 2199 - RNA, 23 nt, Artificial sequence
  specific aptamers
ggaagguauggcaugagguagau

SEQ ID NO: 2200 - RNA, 23 nt, Artificial sequence
  specific aptamers
ggaagguauggcaugagguagcu

SEQ ID NO: 2201 - RNA, 23 nt, Artificial sequence
  specific aptamers
ggaagguauggcaugagguaggu

SEQ ID NO: 2202 - RNA, 23 nt, Artificial sequence
  specific aptamers
ggaagguauggcaugagguaguu

SEQ ID NO: 2203 - RNA, 22 nt, Artificial sequence
  specific aptamers
ggaagguauggcaugagguagu

SEQ ID NO: 2204 - RNA, 23 nt, Artificial sequence
  specific aptamers
ggaagguauggcaugagguauau

SEQ ID NO: 2205 - RNA, 23 nt, Artificial sequence
  specific aptamers
ggaagguauggcaugagguaucu

SEQ ID NO: 2206 - RNA, 23 nt, Artificial sequence
  specific aptamers
ggaagguauggcaugagguaugu

SEQ ID NO: 2207 - RNA, 23 nt, Artificial sequence
  specific aptamers
ggaagguauggcaugagguauuu

SEQ ID NO: 2208 - RNA, 22 nt, Artificial sequence
  specific aptamers
ggaagguauggcaugagguauu

SEQ ID NO: 2209 - RNA, 23 nt, Artificial sequence
  specific aptamers
ggaagguaugguaugagguaaau

SEQ ID NO: 2210 - RNA, 23 nt, Artificial sequence
  specific aptamers
ggaagguaugguaugagguaacu

SEQ ID NO: 2211 - RNA, 23 nt, Artificial sequence
  specific aptamers
ggaagguaugguaugagguaagu

SEQ ID NO: 2212 - RNA, 23 nt, Artificial sequence
  specific aptamers
ggaagguaugguaugagguaauu

SEQ ID NO: 2213 - RNA, 22 nt, Artificial sequence
  specific aptamers
ggaagguaugguaugagguaau

SEQ ID NO: 2214 - RNA, 23 nt, Artificial sequence
  specific aptamers
ggaagguaugguaugagguacau

SEQ ID NO: 2215 - RNA, 23 nt, Artificial sequence
  specific aptamers
ggaagguaugguaugagguaccu

SEQ ID NO: 2216 - RNA, 23 nt, Artificial sequence
  specific aptamers
ggaagguaugguaugagguacgu

SEQ ID NO: 2217 - RNA, 23 nt, Artificial sequence
  specific aptamers
ggaagguaugguaugagguacuu

SEQ ID NO: 2218 - RNA, 22 nt, Artificial sequence
  specific aptamers
ggaagguaugguaugagguacu

SEQ ID NO: 2219 - RNA, 23 nt, Artificial sequence
  specific aptamers
ggaagguaugguaugagguagau

SEQ ID NO: 2220 - RNA, 23 nt, Artificial sequence
  specific aptamers
ggaagguaugguaugagguagcu

SEQ ID NO: 2221 - RNA, 23 nt, Artificial sequence
  specific aptamers
ggaagguaugguaugagguaggu

SEQ ID NO: 2222 - RNA, 23 nt, Artificial sequence
  specific aptamers
ggaagguaugguaugagguaguu

SEQ ID NO: 2223 - RNA, 22 nt, Artificial sequence
  specific aptamers
ggaagguaugguaugagguagu

SEQ ID NO: 2224 - RNA, 23 nt, Artificial sequence
  specific aptamers
ggaagguaugguaugagguauau

SEQ ID NO: 2225 - RNA, 23 nt, Artificial sequence
  specific aptamers
ggaagguaugguaugagguaucu

SEQ ID NO: 2226 - RNA, 23 nt, Artificial sequence
  specific aptamers
ggaagguaugguaugagguaugu

SEQ ID NO: 2227 - RNA, 23 nt, Artificial sequence
  specific aptamers
ggaagguaugguaugagguauuu

SEQ ID NO: 2228 - RNA, 22 nt, Artificial sequence
  specific aptamers
ggaagguaugguaugagguauu

SEQ ID NO: 2229 - RNA, 23 nt, Artificial sequence
  specific aptamers
ggaagguuuggaaugagguaaau

SEQ ID NO: 2230 - RNA, 23 nt, Artificial sequence
  specific aptamers
ggaagguuuggaaugagguaacu

SEQ ID NO: 2231 - RNA, 23 nt, Artificial sequence
  specific aptamers
ggaagguuuggaaugagguaagu

SEQ ID NO: 2232 - RNA, 23 nt, Artificial sequence
  specific aptamers
ggaagguuuggaaugagguaauu

SEQ ID NO: 2233 - RNA, 22 nt, Artificial sequence
  specific aptamers
ggaagguuuggaaugagguaau

SEQ ID NO: 2234 - RNA, 23 nt, Artificial sequence
  specific aptamers
ggaagguuuggaaugagguacau

SEQ ID NO: 2235 - RNA, 23 nt, Artificial sequence
  specific aptamers
ggaagguuuggaaugagguaccu

SEQ ID NO: 2236 - RNA, 23 nt, Artificial sequence
  specific aptamers
ggaagguuuggaaugagguacgu

SEQ ID NO: 2237 - RNA, 23 nt, Artificial sequence
  specific aptamers
ggaagguuuggaaugagguacuu

SEQ ID NO: 2238 - RNA, 22 nt, Artificial sequence
  specific aptamers
ggaagguuuggaaugagguacu

SEQ ID NO: 2239 - RNA, 23 nt, Artificial sequence
  specific aptamers
ggaagguuuggaaugagguagau

SEQ ID NO: 2240 - RNA, 23 nt, Artificial sequence
  specific aptamers
ggaagguuuggaaugagguagcu

SEQ ID NO: 2241 - RNA, 23 nt, Artificial sequence
  specific aptamers
ggaagguuuggaaugagguaggu

SEQ ID NO: 2242 - RNA, 23 nt, Artificial sequence
  specific aptamers
ggaagguuuggaaugagguaguu

SEQ ID NO: 2243 - RNA, 22 nt, Artificial sequence
  specific aptamers
ggaagguuuggaaugagguagu

SEQ ID NO: 2244 - RNA, 23 nt, Artificial sequence
  specific aptamers
ggaagguuuggaaugagguauau

SEQ ID NO: 2245 - RNA, 23 nt, Artificial sequence
  specific aptamers
ggaagguuuggaaugagguaucu

SEQ ID NO: 2246 - RNA, 23 nt, Artificial sequence
  specific aptamers
ggaagguuuggaaugagguaugu

SEQ ID NO: 2247 - RNA, 23 nt, Artificial sequence
  specific aptamers
ggaagguuuggaaugagguauuu

SEQ ID NO: 2248 - RNA, 22 nt, Artificial sequence
  specific aptamers
ggaagguuuggaaugagguauu

SEQ ID NO: 2249 - RNA, 23 nt, Artificial sequence
  specific aptamers
ggaagguuuggcaugagguaaau

SEQ ID NO: 2250 - RNA, 23 nt, Artificial sequence
  specific aptamers
ggaagguuuggcaugagguaacu

SEQ ID NO: 2251 - RNA, 23 nt, Artificial sequence
  specific aptamers
ggaagguuuggcaugagguaagu

SEQ ID NO: 2252 - RNA, 23 nt, Artificial sequence
  specific aptamers
ggaagguuuggcaugagguaauu

SEQ ID NO: 2253 - RNA, 22 nt, Artificial sequence
  specific aptamers
ggaagguuuggcaugagguaau

SEQ ID NO: 2254 - RNA, 23 nt, Artificial sequence
  specific aptamers
ggaagguuuggcaugagguacau

SEQ ID NO: 2255 - RNA, 23 nt, Artificial sequence
  specific aptamers
ggaagguuuggcaugagguaccu

SEQ ID NO: 2256 - RNA, 23 nt, Artificial sequence
  specific aptamers
ggaagguuuggcaugagguacgu

SEQ ID NO: 2257 - RNA, 23 nt, Artificial sequence
  specific aptamers
ggaagguuuggcaugagguacuu

SEQ ID NO: 2258 - RNA, 22 nt, Artificial sequence
  specific aptamers
ggaagguuuggcaugagguacu

SEQ ID NO: 2259 - RNA, 23 nt, Artificial sequence
  specific aptamers
ggaagguuuggcaugagguagau

SEQ ID NO: 2260 - RNA, 23 nt, Artificial sequence
  specific aptamers
ggaagguuuggcaugagguagcu

SEQ ID NO: 2261 - RNA, 23 nt, Artificial sequence
  specific aptamers
ggaagguuuggcaugagguaggu

SEQ ID NO: 2262 - RNA, 23 nt, Artificial sequence
  specific aptamers
ggaagguuuggcaugagguaguu

SEQ ID NO: 2263 - RNA, 22 nt, Artificial sequence
  specific aptamers
ggaagguuuggcaugagguagu

SEQ ID NO: 2264 - RNA, 23 nt, Artificial sequence
  specific aptamers
ggaagguuuggcaugagguauau

SEQ ID NO: 2265 - RNA, 23 nt, Artificial sequence
  specific aptamers
ggaagguuuggcaugagguaucu

SEQ ID NO: 2266 - RNA, 23 nt, Artificial sequence
  specific aptamers
ggaagguuuggcaugagguaugu

SEQ ID NO: 2267 - RNA, 23 nt, Artificial sequence
  specific aptamers
ggaagguuuggcaugagguauuu

SEQ ID NO: 2268 - RNA, 22 nt, Artificial sequence
  specific aptamers
ggaagguuuggcaugagguauu

SEQ ID NO: 2269 - RNA, 23 nt, Artificial sequence
  specific aptamers
ggaagguuugguaugagguaaau

SEQ ID NO: 2270 - RNA, 23 nt, Artificial sequence
  specific aptamers
ggaagguuugguaugagguaacu

SEQ ID NO: 2271 - RNA, 23 nt, Artificial sequence
  specific aptamers
ggaagguuugguaugagguaagu

SEQ ID NO: 2272 - RNA, 23 nt, Artificial sequence
  specific aptamers
ggaagguuugguaugagguaauu

SEQ ID NO: 2273 - RNA, 22 nt, Artificial sequence
  specific aptamers
ggaagguuugguaugagguaau

SEQ ID NO: 2274 - RNA, 23 nt, Artificial sequence
  specific aptamers
ggaagguuugguaugagguacau

SEQ ID NO: 2275 - RNA, 23 nt, Artificial sequence
  specific aptamers
ggaagguuugguaugagguaccu

SEQ ID NO: 2276 - RNA, 23 nt, Artificial sequence
  specific aptamers
ggaagguuugguaugagguacgu

SEQ ID NO: 2277 - RNA, 23 nt, Artificial sequence
  specific aptamers
ggaagguuugguaugagguacuu

SEQ ID NO: 2278 - RNA, 22 nt, Artificial sequence
  specific aptamers
ggaagguuugguaugagguacu

SEQ ID NO: 2279 - RNA, 23 nt, Artificial sequence
  specific aptamers
ggaagguuugguaugagguagau

SEQ ID NO: 2280 - RNA, 23 nt, Artificial sequence
  specific aptamers
ggaagguuugguaugagguagcu

SEQ ID NO: 2281 - RNA, 23 nt, Artificial sequence
  specific aptamers
ggaagguuugguaugagguaggu

SEQ ID NO: 2282 - RNA, 23 nt, Artificial sequence
  specific aptamers
ggaagguuugguaugagguaguu

SEQ ID NO: 2283 - RNA, 22 nt, Artificial sequence
  specific aptamers
ggaagguuugguaugagguagu

SEQ ID NO: 2284 - RNA, 23 nt, Artificial sequence
  specific aptamers
ggaagguuugguaugagguauau

SEQ ID NO: 2285 - RNA, 23 nt, Artificial sequence
  specific aptamers
ggaagguuugguaugagguaucu

SEQ ID NO: 2286 - RNA, 23 nt, Artificial sequence
  specific aptamers
ggaagguuugguaugagguaugu

SEQ ID NO: 2287 - RNA, 23 nt, Artificial sequence
  specific aptamers
ggaagguuugguaugagguauuu

SEQ ID NO: 2288 - RNA, 22 nt, Artificial sequence
  specific aptamers
ggaagguuugguaugagguauu

SEQ ID NO: 2289 - RNA, 23 nt, Artificial sequence
  specific aptamers
gguagguauggaaugagguaaau

SEQ ID NO: 2290 - RNA, 23 nt, Artificial sequence
  specific aptamers
gguagguauggaaugagguaacu

SEQ ID NO: 2291 - RNA, 23 nt, Artificial sequence
  specific aptamers
gguagguauggaaugagguaagu

SEQ ID NO: 2292 - RNA, 23 nt, Artificial sequence
  specific aptamers
gguagguauggaaugagguaauu

SEQ ID NO: 2293 - RNA, 22 nt, Artificial sequence
  specific aptamers
gguagguauggaaugagguaau

SEQ ID NO: 2294 - RNA, 23 nt, Artificial sequence
  specific aptamers
gguagguauggaaugagguacau

SEQ ID NO: 2295 - RNA, 23 nt, Artificial sequence
  specific aptamers
gguagguauggaaugagguaccu

SEQ ID NO: 2296 - RNA, 23 nt, Artificial sequence
  specific aptamers
gguagguauggaaugagguacgu

SEQ ID NO: 2297 - RNA, 23 nt, Artificial sequence
  specific aptamers
gguagguauggaaugagguacuu

SEQ ID NO: 2298 - RNA, 22 nt, Artificial sequence
  specific aptamers
gguagguauggaaugagguacu

SEQ ID NO: 2299 - RNA, 23 nt, Artificial sequence
  specific aptamers
gguagguauggaaugagguagau

SEQ ID NO: 2300 - RNA, 23 nt, Artificial sequence
  specific aptamers
gguagguauggaaugagguagcu

SEQ ID NO: 2301 - RNA, 23 nt, Artificial sequence
  specific aptamers
gguagguauggaaugagguaggu

SEQ ID NO: 2302 - RNA, 23 nt, Artificial sequence
  specific aptamers
gguagguauggaaugagguaguu

SEQ ID NO: 2303 - RNA, 22 nt, Artificial sequence
  specific aptamers
gguagguauggaaugagguagu

SEQ ID NO: 2304 - RNA, 23 nt, Artificial sequence
  specific aptamers
gguagguauggaaugagguauau

SEQ ID NO: 2305 - RNA, 23 nt, Artificial sequence
  specific aptamers
gguagguauggaaugagguaucu

SEQ ID NO: 2306 - RNA, 23 nt, Artificial sequence
  specific aptamers
gguagguauggaaugagguaugu

SEQ ID NO: 2307 - RNA, 23 nt, Artificial sequence
  specific aptamers
gguagguauggaaugagguauuu

SEQ ID NO: 2308 - RNA, 22 nt, Artificial sequence
  specific aptamers
gguagguauggaaugagguauu

SEQ ID NO: 2309 - RNA, 23 nt, Artificial sequence
  specific aptamers
gguagguauggcaugagguaaau

SEQ ID NO: 2310 - RNA, 23 nt, Artificial sequence
  specific aptamers
gguagguauggcaugagguaacu

SEQ ID NO: 2311 - RNA, 23 nt, Artificial sequence
  specific aptamers
gguagguauggcaugagguaagu

SEQ ID NO: 2312 - RNA, 23 nt, Artificial sequence
  specific aptamers
gguagguauggcaugagguaauu

SEQ ID NO: 2313 - RNA, 22 nt, Artificial sequence
  specific aptamers
gguagguauggcaugagguaau

SEQ ID NO: 2314 - RNA, 23 nt, Artificial sequence
  specific aptamers
gguagguauggcaugagguacau

SEQ ID NO: 2315 - RNA, 23 nt, Artificial sequence
  specific aptamers
gguagguauggcaugagguaccu

SEQ ID NO: 2316 - RNA, 23 nt, Artificial sequence
  specific aptamers
gguagguauggcaugagguacgu

SEQ ID NO: 2317 - RNA, 23 nt, Artificial sequence
  specific aptamers
gguagguauggcaugagguacuu

SEQ ID NO: 2318 - RNA, 22 nt, Artificial sequence
  specific aptamers
gguagguauggcaugagguacu

SEQ ID NO: 2319 - RNA, 23 nt, Artificial sequence
  specific aptamers
gguagguauggcaugagguagau

SEQ ID NO: 2320 - RNA, 23 nt, Artificial sequence
  specific aptamers
gguagguauggcaugagguagcu

SEQ ID NO: 2321 - RNA, 23 nt, Artificial sequence
  specific aptamers
gguagguauggcaugagguaggu

SEQ ID NO: 2322 - RNA, 23 nt, Artificial sequence
  specific aptamers
gguagguauggcaugagguaguu

SEQ ID NO: 2323 - RNA, 22 nt, Artificial sequence
  specific aptamers
gguagguauggcaugagguagu

SEQ ID NO: 2324 - RNA, 23 nt, Artificial sequence
  specific aptamers
gguagguauggcaugagguauau

SEQ ID NO: 2325 - RNA, 23 nt, Artificial sequence
  specific aptamers
gguagguauggcaugagguaucu

SEQ ID NO: 2326 - RNA, 23 nt, Artificial sequence
  specific aptamers
gguagguauggcaugagguaugu

SEQ ID NO: 2327 - RNA, 23 nt, Artificial sequence
  specific aptamers
gguagguauggcaugagguauuu

SEQ ID NO: 2328 - RNA, 22 nt, Artificial sequence
  specific aptamers
gguagguauggcaugagguauu

SEQ ID NO: 2329 - RNA, 23 nt, Artificial sequence
  specific aptamers
gguagguaugguaugagguaaau

SEQ ID NO: 2330 - RNA, 23 nt, Artificial sequence
  specific aptamers
gguagguaugguaugagguaacu

SEQ ID NO: 2331 - RNA, 23 nt, Artificial sequence
  specific aptamers
gguagguaugguaugagguaagu

SEQ ID NO: 2332 - RNA, 23 nt, Artificial sequence
  specific aptamers
gguagguaugguaugagguaauu

SEQ ID NO: 2333 - RNA, 22 nt, Artificial sequence
  specific aptamers
gguagguaugguaugagguaau

SEQ ID NO: 2334 - RNA, 23 nt, Artificial sequence
  specific aptamers
gguagguaugguaugagguacau

SEQ ID NO: 2335 - RNA, 23 nt, Artificial sequence
  specific aptamers
gguagguaugguaugagguaccu

SEQ ID NO: 2336 - RNA, 23 nt, Artificial sequence
  specific aptamers
gguagguaugguaugagguacgu

SEQ ID NO: 2337 - RNA, 23 nt, Artificial sequence
  specific aptamers
gguagguaugguaugagguacuu

SEQ ID NO: 2338 - RNA, 22 nt, Artificial sequence
  specific aptamers
gguagguaugguaugagguacu

SEQ ID NO: 2339 - RNA, 23 nt, Artificial sequence
  specific aptamers
gguagguaugguaugagguagau

SEQ ID NO: 2340 - RNA, 23 nt, Artificial sequence
  specific aptamers
gguagguaugguaugagguagcu

SEQ ID NO: 2341 - RNA, 23 nt, Artificial sequence
  specific aptamers
gguagguaugguaugagguaggu

SEQ ID NO: 2342 - RNA, 23 nt, Artificial sequence
  specific aptamers
gguagguaugguaugagguaguu

SEQ ID NO: 2343 - RNA, 22 nt, Artificial sequence
  specific aptamers
gguagguaugguaugagguagu

SEQ ID NO: 2344 - RNA, 23 nt, Artificial sequence
  specific aptamers
gguagguaugguaugagguauau

SEQ ID NO: 2345 - RNA, 23 nt, Artificial sequence
  specific aptamers
gguagguaugguaugagguaucu

SEQ ID NO: 2346 - RNA, 23 nt, Artificial sequence
  specific aptamers
gguagguaugguaugagguaugu

SEQ ID NO: 2347 - RNA, 23 nt, Artificial sequence
  specific aptamers
gguagguaugguaugagguauuu

SEQ ID NO: 2348 - RNA, 22 nt, Artificial sequence
  specific aptamers
gguagguaugguaugagguauu

SEQ ID NO: 2349 - RNA, 23 nt, Artificial sequence
  specific aptamers
gguagguuuggaaugagguaaau

SEQ ID NO: 2350 - RNA, 23 nt, Artificial sequence
  specific aptamers
gguagguuuggaaugagguaacu

SEQ ID NO: 2351 - RNA, 23 nt, Artificial sequence
  specific aptamers
gguagguuuggaaugagguaagu

SEQ ID NO: 2352 - RNA, 23 nt, Artificial sequence
  specific aptamers
gguagguuuggaaugagguaauu

SEQ ID NO: 2353 - RNA, 22 nt, Artificial sequence
  specific aptamers
gguagguuuggaaugagguaau

SEQ ID NO: 2354 - RNA, 23 nt, Artificial sequence
  specific aptamers
gguagguuuggaaugagguacau

SEQ ID NO: 2355 - RNA, 23 nt, Artificial sequence
  specific aptamers
gguagguuuggaaugagguaccu

SEQ ID NO: 2356 - RNA, 23 nt, Artificial sequence
  specific aptamers
gguagguuuggaaugagguacgu

SEQ ID NO: 2357 - RNA, 23 nt, Artificial sequence
  specific aptamers
gguagguuuggaaugagguacuu

SEQ ID NO: 2358 - RNA, 22 nt, Artificial sequence
  specific aptamers
gguagguuuggaaugagguacu

SEQ ID NO: 2359 - RNA, 23 nt, Artificial sequence
  specific aptamers
gguagguuuggaaugagguagau

SEQ ID NO: 2360 - RNA, 23 nt, Artificial sequence
  specific aptamers
gguagguuuggaaugagguagcu

SEQ ID NO: 2361 - RNA, 23 nt, Artificial sequence
  specific aptamers
gguagguuuggaaugagguaggu

SEQ ID NO: 2362 - RNA, 23 nt, Artificial sequence
  specific aptamers
gguagguuuggaaugagguaguu

SEQ ID NO: 2363 - RNA, 22 nt, Artificial sequence
  specific aptamers
gguagguuuggaaugagguagu

SEQ ID NO: 2364 - RNA, 23 nt, Artificial sequence
  specific aptamers
gguagguuuggaaugagguauau

SEQ ID NO: 2365 - RNA, 23 nt, Artificial sequence
  specific aptamers
gguagguuuggaaugagguaucu

SEQ ID NO: 2366 - RNA, 23 nt, Artificial sequence
  specific aptamers
gguagguuuggaaugagguaugu

SEQ ID NO: 2367 - RNA, 23 nt, Artificial sequence
  specific aptamers
gguagguuuggaaugagguauuu

SEQ ID NO: 2368 - RNA, 22 nt, Artificial sequence
  specific aptamers
gguagguuuggaaugagguauu

SEQ ID NO: 2369 - RNA, 23 nt, Artificial sequence
  specific aptamers
gguagguuuggcaugagguaaau

SEQ ID NO: 2370 - RNA, 23 nt, Artificial sequence
  specific aptamers
gguagguuuggcaugagguaacu

SEQ ID NO: 2371 - RNA, 23 nt, Artificial sequence
  specific aptamers
gguagguuuggcaugagguaagu

SEQ ID NO: 2372 - RNA, 23 nt, Artificial sequence
  specific aptamers
gguagguuuggcaugagguaauu

SEQ ID NO: 2373 - RNA, 22 nt, Artificial sequence
  specific aptamers
gguagguuuggcaugagguaau

SEQ ID NO: 2374 - RNA, 23 nt, Artificial sequence
  specific aptamers
gguagguuuggcaugagguacau

SEQ ID NO: 2375 - RNA, 23 nt, Artificial sequence
  specific aptamers
gguagguuuggcaugagguaccu

SEQ ID NO: 2376 - RNA, 23 nt, Artificial sequence
  specific aptamers
gguagguuuggcaugagguacgu

SEQ ID NO: 2377 - RNA, 23 nt, Artificial sequence
  specific aptamers
gguagguuuggcaugagguacuu

SEQ ID NO: 2378 - RNA, 22 nt, Artificial sequence
  specific aptamers
gguagguuuggcaugagguacu

SEQ ID NO: 2379 - RNA, 23 nt, Artificial sequence
  specific aptamers
gguagguuuggcaugagguagau

SEQ ID NO: 2380 - RNA, 23 nt, Artificial sequence
  specific aptamers
gguagguuuggcaugagguagcu

SEQ ID NO: 2381 - RNA, 23 nt, Artificial sequence
  specific aptamers
gguagguuuggcaugagguaggu

SEQ ID NO: 2382 - RNA, 23 nt, Artificial sequence
  specific aptamers
gguagguuuggcaugagguaguu

SEQ ID NO: 2383 - RNA, 22 nt, Artificial sequence
  specific aptamers
gguagguuuggcaugagguagu

SEQ ID NO: 2384 - RNA, 23 nt, Artificial sequence
  specific aptamers
gguagguuuggcaugagguauau

SEQ ID NO: 2385 - RNA, 23 nt, Artificial sequence
  specific aptamers
gguagguuuggcaugagguaucu

SEQ ID NO: 2386 - RNA, 23 nt, Artificial sequence
  specific aptamers
gguagguuuggcaugagguaugu

SEQ ID NO: 2387 - RNA, 23 nt, Artificial sequence
  specific aptamers
gguagguuuggcaugagguauuu

SEQ ID NO: 2388 - RNA, 22 nt, Artificial sequence
  specific aptamers
gguagguuuggcaugagguauu

SEQ ID NO: 2389 - RNA, 23 nt, Artificial sequence
  specific aptamers
gguagguuugguaugagguaaau

SEQ ID NO: 2390 - RNA, 23 nt, Artificial sequence
  specific aptamers
gguagguuugguaugagguaacu

SEQ ID NO: 2391 - RNA, 23 nt, Artificial sequence
  specific aptamers
gguagguuugguaugagguaagu

SEQ ID NO: 2392 - RNA, 23 nt, Artificial sequence
  specific aptamers
gguagguuugguaugagguaauu

SEQ ID NO: 2393 - RNA, 22 nt, Artificial sequence
  specific aptamers
gguagguuugguaugagguaau

SEQ ID NO: 2394 - RNA, 23 nt, Artificial sequence
  specific aptamers
gguagguuugguaugagguacau

SEQ ID NO: 2395 - RNA, 23 nt, Artificial sequence
  specific aptamers
gguagguuugguaugagguaccu

SEQ ID NO: 2396 - RNA, 23 nt, Artificial sequence
  specific aptamers
gguagguuugguaugagguacgu

SEQ ID NO: 2397 - RNA, 23 nt, Artificial sequence
  specific aptamers
gguagguuugguaugagguacuu

SEQ ID NO: 2398 - RNA, 22 nt, Artificial sequence
  specific aptamers
gguagguuugguaugagguacu

SEQ ID NO: 2399 - RNA, 23 nt, Artificial sequence
  specific aptamers
gguagguuugguaugagguagau

SEQ ID NO: 2400 - RNA, 23 nt, Artificial sequence
  specific aptamers
gguagguuugguaugagguagcu

SEQ ID NO: 2401 - RNA, 23 nt, Artificial sequence
  specific aptamers
gguagguuugguaugagguaggu

SEQ ID NO: 2402 - RNA, 23 nt, Artificial sequence
  specific aptamers
gguagguuugguaugagguaguu

SEQ ID NO: 2403 - RNA, 22 nt, Artificial sequence
  specific aptamers
gguagguuugguaugagguagu

SEQ ID NO: 2404 - RNA, 23 nt, Artificial sequence
  specific aptamers
gguagguuugguaugagguauau

SEQ ID NO: 2405 - RNA, 23 nt, Artificial sequence
  specific aptamers
gguagguuugguaugagguaucu

SEQ ID NO: 2406 - RNA, 23 nt, Artificial sequence
  specific aptamers
gguagguuugguaugagguaugu

SEQ ID NO: 2407 - RNA, 23 nt, Artificial sequence
  specific aptamers
gguagguuugguaugagguauuu

SEQ ID NO: 2408 - RNA, 22 nt, Artificial sequence
  specific aptamers
gguagguuugguaugagguauu

SEQ ID NO: 2409 - RNA, 21 nt, Artificial sequence
  specific aptamers
ggaagaggagaggaagaggag

SEQ ID NO: 2410 - RNA, 21 nt, Artificial sequence
  specific aptamers
ggaagaggagaggaagaggcg

SEQ ID NO: 2411 - RNA, 21 nt, Artificial sequence
  specific aptamers
ggaagaggagaggaagaggug

SEQ ID NO: 2412 - RNA, 21 nt, Artificial sequence
  specific aptamers
ggaagaggagaggaagcggag

SEQ ID NO: 2413 - RNA, 21 nt, Artificial sequence
  specific aptamers
ggaagaggagaggaagcggcg

SEQ ID NO: 2414 - RNA, 21 nt, Artificial sequence
  specific aptamers
ggaagaggagaggaagcggug

SEQ ID NO: 2415 - RNA, 21 nt, Artificial sequence
  specific aptamers
ggaagaggagaggaaguggag

SEQ ID NO: 2416 - RNA, 21 nt, Artificial sequence
  specific aptamers
ggaagaggagaggaaguggcg

SEQ ID NO: 2417 - RNA, 21 nt, Artificial sequence
  specific aptamers
ggaagaggagaggaaguggug

SEQ ID NO: 2418 - RNA, 21 nt, Artificial sequence
  specific aptamers
ggaagaggagaggaugaggag

SEQ ID NO: 2419 - RNA, 21 nt, Artificial sequence
  specific aptamers
ggaagaggagaggaugaggcg

SEQ ID NO: 2420 - RNA, 21 nt, Artificial sequence
  specific aptamers
ggaagaggagaggaugaggug

SEQ ID NO: 2421 - RNA, 21 nt, Artificial sequence
  specific aptamers
ggaagaggagaggaugcggag

SEQ ID NO: 2422 - RNA, 21 nt, Artificial sequence
  specific aptamers
ggaagaggagaggaugcggcg

SEQ ID NO: 2423 - RNA, 21 nt, Artificial sequence
  specific aptamers
ggaagaggagaggaugcggug

SEQ ID NO: 2424 - RNA, 21 nt, Artificial sequence
  specific aptamers
ggaagaggagaggauguggag

SEQ ID NO: 2425 - RNA, 21 nt, Artificial sequence
  specific aptamers
ggaagaggagaggauguggcg

SEQ ID NO: 2426 - RNA, 21 nt, Artificial sequence
  specific aptamers
ggaagaggagaggauguggug

SEQ ID NO: 2427 - RNA, 20 nt, Artificial sequence
  specific aptamers
ggaagaggagaggagaggag

SEQ ID NO: 2428 - RNA, 20 nt, Artificial sequence
  specific aptamers
ggaagaggagaggagaggcg

SEQ ID NO: 2429 - RNA, 20 nt, Artificial sequence
  specific aptamers
ggaagaggagaggagaggug

SEQ ID NO: 2430 - RNA, 20 nt, Artificial sequence
  specific aptamers
ggaagaggagaggagcggag

SEQ ID NO: 2431 - RNA, 20 nt, Artificial sequence
  specific aptamers
ggaagaggagaggagcggcg

SEQ ID NO: 2432 - RNA, 20 nt, Artificial sequence
  specific aptamers
ggaagaggagaggagcggug

SEQ ID NO: 2433 - RNA, 20 nt, Artificial sequence
  specific aptamers
ggaagaggagaggaguggag

SEQ ID NO: 2434 - RNA, 20 nt, Artificial sequence
  specific aptamers
ggaagaggagaggaguggcg

SEQ ID NO: 2435 - RNA, 20 nt, Artificial sequence
  specific aptamers
ggaagaggagaggaguggug

SEQ ID NO: 2436 - RNA, 21 nt, Artificial sequence
  specific aptamers
ggaagaggagagguagaggag

SEQ ID NO: 2437 - RNA, 21 nt, Artificial sequence
  specific aptamers
ggaagaggagagguagaggcg

SEQ ID NO: 2438 - RNA, 21 nt, Artificial sequence
  specific aptamers
ggaagaggagagguagaggug

SEQ ID NO: 2439 - RNA, 21 nt, Artificial sequence
  specific aptamers
ggaagaggagagguagcggag

SEQ ID NO: 2440 - RNA, 21 nt, Artificial sequence
  specific aptamers
ggaagaggagagguagcggcg

SEQ ID NO: 2441 - RNA, 21 nt, Artificial sequence
  specific aptamers
ggaagaggagagguagcggug

SEQ ID NO: 2442 - RNA, 21 nt, Artificial sequence
  specific aptamers
ggaagaggagagguaguggag

SEQ ID NO: 2443 - RNA, 21 nt, Artificial sequence
  specific aptamers
ggaagaggagagguaguggcg

SEQ ID NO: 2444 - RNA, 21 nt, Artificial sequence
  specific aptamers
ggaagaggagagguaguggug

SEQ ID NO: 2445 - RNA, 21 nt, Artificial sequence
  specific aptamers
ggaagaggagagguugaggag

SEQ ID NO: 2446 - RNA, 21 nt, Artificial sequence
  specific aptamers
ggaagaggagagguugaggcg

SEQ ID NO: 2447 - RNA, 21 nt, Artificial sequence
  specific aptamers
ggaagaggagagguugaggug

SEQ ID NO: 2448 - RNA, 21 nt, Artificial sequence
  specific aptamers
ggaagaggagagguugcggag

SEQ ID NO: 2449 - RNA, 21 nt, Artificial sequence
  specific aptamers
ggaagaggagagguugcggcg

SEQ ID NO: 2450 - RNA, 21 nt, Artificial sequence
  specific aptamers
ggaagaggagagguugcggug

SEQ ID NO: 2451 - RNA, 21 nt, Artificial sequence
  specific aptamers
ggaagaggagagguuguggag

SEQ ID NO: 2452 - RNA, 21 nt, Artificial sequence
  specific aptamers
ggaagaggagagguuguggcg

SEQ ID NO: 2453 - RNA, 21 nt, Artificial sequence
  specific aptamers
ggaagaggagagguuguggug

SEQ ID NO: 2454 - RNA, 20 nt, Artificial sequence
  specific aptamers
ggaagaggagaggugaggag

SEQ ID NO: 2455 - RNA, 20 nt, Artificial sequence
  specific aptamers
ggaagaggagaggugaggcg

SEQ ID NO: 2456 - RNA, 20 nt, Artificial sequence
  specific aptamers
ggaagaggagaggugaggug

SEQ ID NO: 2457 - RNA, 20 nt, Artificial sequence
  specific aptamers
ggaagaggagaggugcggag

SEQ ID NO: 2458 - RNA, 20 nt, Artificial sequence
  specific aptamers
ggaagaggagaggugcggcg

SEQ ID NO: 2459 - RNA, 20 nt, Artificial sequence
  specific aptamers
ggaagaggagaggugcggug

SEQ ID NO: 2460 - RNA, 20 nt, Artificial sequence
  specific aptamers
ggaagaggagagguguggag

SEQ ID NO: 2461 - RNA, 20 nt, Artificial sequence
  specific aptamers
ggaagaggagagguguggcg

SEQ ID NO: 2462 - RNA, 20 nt, Artificial sequence
  specific aptamers
ggaagaggagagguguggug

SEQ ID NO: 2463 - RNA, 21 nt, Artificial sequence
  specific aptamers
ggaagaggaguggaagaggag

SEQ ID NO: 2464 - RNA, 21 nt, Artificial sequence
  specific aptamers
ggaagaggaguggaagaggcg

SEQ ID NO: 2465 - RNA, 21 nt, Artificial sequence
  specific aptamers
ggaagaggaguggaagaggug

SEQ ID NO: 2466 - RNA, 21 nt, Artificial sequence
  specific aptamers
ggaagaggaguggaagcggag

SEQ ID NO: 2467 - RNA, 21 nt, Artificial sequence
  specific aptamers
ggaagaggaguggaagcggcg

SEQ ID NO: 2468 - RNA, 21 nt, Artificial sequence
  specific aptamers
ggaagaggaguggaagcggug

SEQ ID NO: 2469 - RNA, 21 nt, Artificial sequence
  specific aptamers
ggaagaggaguggaaguggag

SEQ ID NO: 2470 - RNA, 21 nt, Artificial sequence
  specific aptamers
ggaagaggaguggaaguggcg

SEQ ID NO: 2471 - RNA, 21 nt, Artificial sequence
  specific aptamers
ggaagaggaguggaaguggug

SEQ ID NO: 2472 - RNA, 21 nt, Artificial sequence
  specific aptamers
ggaagaggaguggaugaggag

SEQ ID NO: 2473 - RNA, 21 nt, Artificial sequence
  specific aptamers
ggaagaggaguggaugaggcg

SEQ ID NO: 2474 - RNA, 21 nt, Artificial sequence
  specific aptamers
ggaagaggaguggaugaggug

SEQ ID NO: 2475 - RNA, 21 nt, Artificial sequence
  specific aptamers
ggaagaggaguggaugcggag

SEQ ID NO: 2476 - RNA, 21 nt, Artificial sequence
  specific aptamers
ggaagaggaguggaugcggcg

SEQ ID NO: 2477 - RNA, 21 nt, Artificial sequence
  specific aptamers
ggaagaggaguggaugcggug

SEQ ID NO: 2478 - RNA, 21 nt, Artificial sequence
  specific aptamers
ggaagaggaguggauguggag

SEQ ID NO: 2479 - RNA, 21 nt, Artificial sequence
  specific aptamers
ggaagaggaguggauguggcg

SEQ ID NO: 2480 - RNA, 21 nt, Artificial sequence
  specific aptamers
ggaagaggaguggauguggug

SEQ ID NO: 2481 - RNA, 20 nt, Artificial sequence
  specific aptamers
ggaagaggaguggagaggag

SEQ ID NO: 2482 - RNA, 20 nt, Artificial sequence
  specific aptamers
ggaagaggaguggagaggcg

SEQ ID NO: 2483 - RNA, 20 nt, Artificial sequence
  specific aptamers
ggaagaggaguggagaggug

SEQ ID NO: 2484 - RNA, 20 nt, Artificial sequence
  specific aptamers
ggaagaggaguggagcggag

SEQ ID NO: 2485 - RNA, 20 nt, Artificial sequence
  specific aptamers
ggaagaggaguggagcggcg

SEQ ID NO: 2486 - RNA, 20 nt, Artificial sequence
  specific aptamers
ggaagaggaguggagcggug

SEQ ID NO: 2487 - RNA, 20 nt, Artificial sequence
  specific aptamers
ggaagaggaguggaguggag

SEQ ID NO: 2488 - RNA, 20 nt, Artificial sequence
  specific aptamers
ggaagaggaguggaguggcg

SEQ ID NO: 2489 - RNA, 20 nt, Artificial sequence
  specific aptamers
ggaagaggaguggaguggug

SEQ ID NO: 2490 - RNA, 21 nt, Artificial sequence
  specific aptamers
ggaagaggagugguagaggag

SEQ ID NO: 2491 - RNA, 21 nt, Artificial sequence
  specific aptamers
ggaagaggagugguagaggcg

SEQ ID NO: 2492 - RNA, 21 nt, Artificial sequence
  specific aptamers
ggaagaggagugguagaggug

SEQ ID NO: 2493 - RNA, 21 nt, Artificial sequence
  specific aptamers
ggaagaggagugguagcggag

SEQ ID NO: 2494 - RNA, 21 nt, Artificial sequence
  specific aptamers
ggaagaggagugguagcggcg

SEQ ID NO: 2495 - RNA, 21 nt, Artificial sequence
  specific aptamers
ggaagaggagugguagcggug

SEQ ID NO: 2496 - RNA, 21 nt, Artificial sequence
  specific aptamers
ggaagaggagugguaguggag

SEQ ID NO: 2497 - RNA, 21 nt, Artificial sequence
  specific aptamers
ggaagaggagugguaguggcg

SEQ ID NO: 2498 - RNA, 21 nt, Artificial sequence
  specific aptamers
ggaagaggagugguaguggug

SEQ ID NO: 2499 - RNA, 21 nt, Artificial sequence
  specific aptamers
ggaagaggagugguugaggag

SEQ ID NO: 2500 - RNA, 21 nt, Artificial sequence
  specific aptamers
ggaagaggagugguugaggcg

SEQ ID NO: 2501 - RNA, 21 nt, Artificial sequence
  specific aptamers
ggaagaggagugguugaggug

SEQ ID NO: 2502 - RNA, 21 nt, Artificial sequence
  specific aptamers
ggaagaggagugguugcggag

SEQ ID NO: 2503 - RNA, 21 nt, Artificial sequence
  specific aptamers
ggaagaggagugguugcggcg

SEQ ID NO: 2504 - RNA, 21 nt, Artificial sequence
  specific aptamers
ggaagaggagugguugcggug

SEQ ID NO: 2505 - RNA, 21 nt, Artificial sequence
  specific aptamers
ggaagaggagugguuguggag

SEQ ID NO: 2506 - RNA, 21 nt, Artificial sequence
  specific aptamers
ggaagaggagugguuguggcg

SEQ ID NO: 2507 - RNA, 21 nt, Artificial sequence
  specific aptamers
ggaagaggagugguuguggug

SEQ ID NO: 2508 - RNA, 20 nt, Artificial sequence
  specific aptamers
ggaagaggaguggugaggag

SEQ ID NO: 2509 - RNA, 20 nt, Artificial sequence
  specific aptamers
ggaagaggaguggugaggcg

SEQ ID NO: 2510 - RNA, 20 nt, Artificial sequence
  specific aptamers
ggaagaggaguggugaggug

SEQ ID NO: 2511 - RNA, 20 nt, Artificial sequence
  specific aptamers
ggaagaggaguggugcggag

SEQ ID NO: 2512 - RNA, 20 nt, Artificial sequence
  specific aptamers
ggaagaggaguggugcggcg

SEQ ID NO: 2513 - RNA, 20 nt, Artificial sequence
  specific aptamers
ggaagaggaguggugcggug

SEQ ID NO: 2514 - RNA, 20 nt, Artificial sequence
  specific aptamers
ggaagaggagugguguggag

SEQ ID NO: 2515 - RNA, 20 nt, Artificial sequence
  specific aptamers
ggaagaggagugguguggcg

SEQ ID NO: 2516 - RNA, 20 nt, Artificial sequence
  specific aptamers
ggaagaggagugguguggug

SEQ ID NO: 2517 - RNA, 21 nt, Artificial sequence
  specific aptamers
ggaagaggugaggaagaggag

SEQ ID NO: 2518 - RNA, 21 nt, Artificial sequence
  specific aptamers
ggaagaggugaggaagaggcg

SEQ ID NO: 2519 - RNA, 21 nt, Artificial sequence
  specific aptamers
ggaagaggugaggaagaggug

SEQ ID NO: 2520 - RNA, 21 nt, Artificial sequence
  specific aptamers
ggaagaggugaggaagcggag

SEQ ID NO: 2521 - RNA, 21 nt, Artificial sequence
  specific aptamers
ggaagaggugaggaagcggcg

SEQ ID NO: 2522 - RNA, 21 nt, Artificial sequence
  specific aptamers
ggaagaggugaggaagcggug

SEQ ID NO: 2523 - RNA, 21 nt, Artificial sequence
  specific aptamers
ggaagaggugaggaaguggag

SEQ ID NO: 2524 - RNA, 21 nt, Artificial sequence
  specific aptamers
ggaagaggugaggaaguggcg

SEQ ID NO: 2525 - RNA, 21 nt, Artificial sequence
  specific aptamers
ggaagaggugaggaaguggug

SEQ ID NO: 2526 - RNA, 21 nt, Artificial sequence
  specific aptamers
ggaagaggugaggaugaggag

SEQ ID NO: 2527 - RNA, 21 nt, Artificial sequence
  specific aptamers
ggaagaggugaggaugaggcg

SEQ ID NO: 2528 - RNA, 21 nt, Artificial sequence
  specific aptamers
ggaagaggugaggaugaggug

SEQ ID NO: 2529 - RNA, 21 nt, Artificial sequence
  specific aptamers
ggaagaggugaggaugcggag

SEQ ID NO: 2530 - RNA, 21 nt, Artificial sequence
  specific aptamers
ggaagaggugaggaugcggcg

SEQ ID NO: 2531 - RNA, 21 nt, Artificial sequence
  specific aptamers
ggaagaggugaggaugcggug

SEQ ID NO: 2532 - RNA, 21 nt, Artificial sequence
  specific aptamers
ggaagaggugaggauguggag

SEQ ID NO: 2533 - RNA, 21 nt, Artificial sequence
  specific aptamers
ggaagaggugaggauguggcg

SEQ ID NO: 2534 - RNA, 21 nt, Artificial sequence
  specific aptamers
ggaagaggugaggauguggug

SEQ ID NO: 2535 - RNA, 20 nt, Artificial sequence
  specific aptamers
ggaagaggugaggagaggag

SEQ ID NO: 2536 - RNA, 20 nt, Artificial sequence
  specific aptamers
ggaagaggugaggagaggcg

SEQ ID NO: 2537 - RNA, 20 nt, Artificial sequence
  specific aptamers
ggaagaggugaggagaggug

SEQ ID NO: 2538 - RNA, 20 nt, Artificial sequence
  specific aptamers
ggaagaggugaggagcggag

SEQ ID NO: 2539 - RNA, 20 nt, Artificial sequence
  specific aptamers
ggaagaggugaggagcggcg

SEQ ID NO: 2540 - RNA, 20 nt, Artificial sequence
  specific aptamers
ggaagaggugaggagcggug

SEQ ID NO: 2541 - RNA, 20 nt, Artificial sequence
  specific aptamers
ggaagaggugaggaguggag

SEQ ID NO: 2542 - RNA, 20 nt, Artificial sequence
  specific aptamers
ggaagaggugaggaguggcg

SEQ ID NO: 2543 - RNA, 20 nt, Artificial sequence
  specific aptamers
ggaagaggugaggaguggug

SEQ ID NO: 2544 - RNA, 21 nt, Artificial sequence
  specific aptamers
ggaagaggugagguagaggag

SEQ ID NO: 2545 - RNA, 21 nt, Artificial sequence
  specific aptamers
ggaagaggugagguagaggcg

SEQ ID NO: 2546 - RNA, 21 nt, Artificial sequence
  specific aptamers
ggaagaggugagguagaggug

SEQ ID NO: 2547 - RNA, 21 nt, Artificial sequence
  specific aptamers
ggaagaggugagguagcggag

SEQ ID NO: 2548 - RNA, 21 nt, Artificial sequence
  specific aptamers
ggaagaggugagguagcggcg

SEQ ID NO: 2549 - RNA, 21 nt, Artificial sequence
  specific aptamers
ggaagaggugagguagcggug

SEQ ID NO: 2550 - RNA, 21 nt, Artificial sequence
  specific aptamers
ggaagaggugagguaguggag

SEQ ID NO: 2551 - RNA, 21 nt, Artificial sequence
  specific aptamers
ggaagaggugagguaguggcg

SEQ ID NO: 2552 - RNA, 21 nt, Artificial sequence
  specific aptamers
ggaagaggugagguaguggug

SEQ ID NO: 2553 - RNA, 21 nt, Artificial sequence
  specific aptamers
ggaagaggugagguugaggag

SEQ ID NO: 2554 - RNA, 21 nt, Artificial sequence
  specific aptamers
ggaagaggugagguugaggcg

SEQ ID NO: 2555 - RNA, 21 nt, Artificial sequence
  specific aptamers
ggaagaggugagguugaggug

SEQ ID NO: 2556 - RNA, 21 nt, Artificial sequence
  specific aptamers
ggaagaggugagguugcggag

SEQ ID NO: 2557 - RNA, 21 nt, Artificial sequence
  specific aptamers
ggaagaggugagguugcggcg

SEQ ID NO: 2558 - RNA, 21 nt, Artificial sequence
  specific aptamers
ggaagaggugagguugcggug

SEQ ID NO: 2559 - RNA, 21 nt, Artificial sequence
  specific aptamers
ggaagaggugagguuguggag

SEQ ID NO: 2560 - RNA, 21 nt, Artificial sequence
  specific aptamers
ggaagaggugagguuguggcg

SEQ ID NO: 2561 - RNA, 21 nt, Artificial sequence
  specific aptamers
ggaagaggugagguuguggug

SEQ ID NO: 2562 - RNA, 20 nt, Artificial sequence
  specific aptamers
ggaagaggugaggugaggag

SEQ ID NO: 2563 - RNA, 20 nt, Artificial sequence
  specific aptamers
ggaagaggugaggugaggcg

SEQ ID NO: 2564 - RNA, 20 nt, Artificial sequence
  specific aptamers
ggaagaggugaggugaggug

SEQ ID NO: 2565 - RNA, 20 nt, Artificial sequence
  specific aptamers
ggaagaggugaggugcggag

SEQ ID NO: 2566 - RNA, 20 nt, Artificial sequence
  specific aptamers
ggaagaggugaggugcggcg

SEQ ID NO: 2567 - RNA, 20 nt, Artificial sequence
  specific aptamers
ggaagaggugaggugcggug

SEQ ID NO: 2568 - RNA, 20 nt, Artificial sequence
  specific aptamers
ggaagaggugagguguggag

SEQ ID NO: 2569 - RNA, 20 nt, Artificial sequence
  specific aptamers
ggaagaggugagguguggcg

SEQ ID NO: 2570 - RNA, 20 nt, Artificial sequence
  specific aptamers
ggaagaggugagguguggug

SEQ ID NO: 2571 - RNA, 21 nt, Artificial sequence
  specific aptamers
ggaagagguguggaagaggag

SEQ ID NO: 2572 - RNA, 21 nt, Artificial sequence
  specific aptamers
ggaagagguguggaagaggcg

SEQ ID NO: 2573 - RNA, 21 nt, Artificial sequence
  specific aptamers
ggaagagguguggaagaggug

SEQ ID NO: 2574 - RNA, 21 nt, Artificial sequence
  specific aptamers
ggaagagguguggaagcggag

SEQ ID NO: 2575 - RNA, 21 nt, Artificial sequence
  specific aptamers
ggaagagguguggaagcggcg

SEQ ID NO: 2576 - RNA, 21 nt, Artificial sequence
  specific aptamers
ggaagagguguggaagcggug

SEQ ID NO: 2577 - RNA, 21 nt, Artificial sequence
  specific aptamers
ggaagagguguggaaguggag

SEQ ID NO: 2578 - RNA, 21 nt, Artificial sequence
  specific aptamers
ggaagagguguggaaguggcg

SEQ ID NO: 2579 - RNA, 21 nt, Artificial sequence
  specific aptamers
ggaagagguguggaaguggug

SEQ ID NO: 2580 - RNA, 21 nt, Artificial sequence
  specific aptamers
ggaagagguguggaugaggag

SEQ ID NO: 2581 - RNA, 21 nt, Artificial sequence
  specific aptamers
ggaagagguguggaugaggcg

SEQ ID NO: 2582 - RNA, 21 nt, Artificial sequence
  specific aptamers
ggaagagguguggaugaggug

SEQ ID NO: 2583 - RNA, 21 nt, Artificial sequence
  specific aptamers
ggaagagguguggaugcggag

SEQ ID NO: 2584 - RNA, 21 nt, Artificial sequence
  specific aptamers
ggaagagguguggaugcggcg

SEQ ID NO: 2585 - RNA, 21 nt, Artificial sequence
  specific aptamers
ggaagagguguggaugcggug

SEQ ID NO: 2586 - RNA, 21 nt, Artificial sequence
  specific aptamers
ggaagagguguggauguggag

SEQ ID NO: 2587 - RNA, 21 nt, Artificial sequence
  specific aptamers
ggaagagguguggauguggcg

SEQ ID NO: 2588 - RNA, 21 nt, Artificial sequence
  specific aptamers
ggaagagguguggauguggug

SEQ ID NO: 2589 - RNA, 20 nt, Artificial sequence
  specific aptamers
ggaagagguguggagaggag

SEQ ID NO: 2590 - RNA, 20 nt, Artificial sequence
  specific aptamers
ggaagagguguggagaggcg

SEQ ID NO: 2591 - RNA, 20 nt, Artificial sequence
  specific aptamers
ggaagagguguggagaggug

SEQ ID NO: 2592 - RNA, 20 nt, Artificial sequence
  specific aptamers
ggaagagguguggagcggag

SEQ ID NO: 2593 - RNA, 20 nt, Artificial sequence
  specific aptamers
ggaagagguguggagcggcg

SEQ ID NO: 2594 - RNA, 20 nt, Artificial sequence
  specific aptamers
ggaagagguguggagcggug

SEQ ID NO: 2595 - RNA, 20 nt, Artificial sequence
  specific aptamers
ggaagagguguggaguggag

SEQ ID NO: 2596 - RNA, 20 nt, Artificial sequence
  specific aptamers
ggaagagguguggaguggcg

SEQ ID NO: 2597 - RNA, 20 nt, Artificial sequence
  specific aptamers
ggaagagguguggaguggug

SEQ ID NO: 2598 - RNA, 21 nt, Artificial sequence
  specific aptamers
ggaagaggugugguagaggag

SEQ ID NO: 2599 - RNA, 21 nt, Artificial sequence
  specific aptamers
ggaagaggugugguagaggcg

SEQ ID NO: 2600 - RNA, 21 nt, Artificial sequence
  specific aptamers
ggaagaggugugguagaggug

SEQ ID NO: 2601 - RNA, 21 nt, Artificial sequence
  specific aptamers
ggaagaggugugguagcggag

SEQ ID NO: 2602 - RNA, 21 nt, Artificial sequence
  specific aptamers
ggaagaggugugguagcggcg

SEQ ID NO: 2603 - RNA, 21 nt, Artificial sequence
  specific aptamers
ggaagaggugugguagcggug

SEQ ID NO: 2604 - RNA, 21 nt, Artificial sequence
  specific aptamers
ggaagaggugugguaguggag

SEQ ID NO: 2605 - RNA, 21 nt, Artificial sequence
  specific aptamers
ggaagaggugugguaguggcg

SEQ ID NO: 2606 - RNA, 21 nt, Artificial sequence
  specific aptamers
ggaagaggugugguaguggug

SEQ ID NO: 2607 - RNA, 21 nt, Artificial sequence
  specific aptamers
ggaagaggugugguugaggag

SEQ ID NO: 2608 - RNA, 21 nt, Artificial sequence
  specific aptamers
ggaagaggugugguugaggcg

SEQ ID NO: 2609 - RNA, 21 nt, Artificial sequence
  specific aptamers
ggaagaggugugguugaggug

SEQ ID NO: 2610 - RNA, 21 nt, Artificial sequence
  specific aptamers
ggaagaggugugguugcggag

SEQ ID NO: 2611 - RNA, 21 nt, Artificial sequence
  specific aptamers
ggaagaggugugguugcggcg

SEQ ID NO: 2612 - RNA, 21 nt, Artificial sequence
  specific aptamers
ggaagaggugugguugcggug

SEQ ID NO: 2613 - RNA, 21 nt, Artificial sequence
  specific aptamers
ggaagaggugugguuguggag

SEQ ID NO: 2614 - RNA, 21 nt, Artificial sequence
  specific aptamers
ggaagaggugugguuguggcg

SEQ ID NO: 2615 - RNA, 21 nt, Artificial sequence
  specific aptamers
ggaagaggugugguuguggug

SEQ ID NO: 2616 - RNA, 20 nt, Artificial sequence
  specific aptamers
ggaagagguguggugaggag

SEQ ID NO: 2617 - RNA, 20 nt, Artificial sequence
  specific aptamers
ggaagagguguggugaggcg

SEQ ID NO: 2618 - RNA, 20 nt, Artificial sequence
  specific aptamers
ggaagagguguggugaggug

SEQ ID NO: 2619 - RNA, 20 nt, Artificial sequence
  specific aptamers
ggaagagguguggugcggag

SEQ ID NO: 2620 - RNA, 20 nt, Artificial sequence
  specific aptamers
ggaagagguguggugcggcg

SEQ ID NO: 2621 - RNA, 20 nt, Artificial sequence
  specific aptamers
ggaagagguguggugcggug

SEQ ID NO: 2622 - RNA, 20 nt, Artificial sequence
  specific aptamers
ggaagaggugugguguggag

SEQ ID NO: 2623 - RNA, 20 nt, Artificial sequence
  specific aptamers
ggaagaggugugguguggcg

SEQ ID NO: 2624 - RNA, 20 nt, Artificial sequence
  specific aptamers
ggaagaggugugguguggug

SEQ ID NO: 2625 - RNA, 21 nt, Artificial sequence
  specific aptamers
ggaaguggagaggaagaggag

SEQ ID NO: 2626 - RNA, 21 nt, Artificial sequence
  specific aptamers
ggaaguggagaggaagaggcg

SEQ ID NO: 2627 - RNA, 21 nt, Artificial sequence
  specific aptamers
ggaaguggagaggaagaggug

SEQ ID NO: 2628 - RNA, 21 nt, Artificial sequence
  specific aptamers
ggaaguggagaggaagcggag

SEQ ID NO: 2629 - RNA, 21 nt, Artificial sequence
  specific aptamers
ggaaguggagaggaagcggcg

SEQ ID NO: 2630 - RNA, 21 nt, Artificial sequence
  specific aptamers
ggaaguggagaggaagcggug

SEQ ID NO: 2631 - RNA, 21 nt, Artificial sequence
  specific aptamers
ggaaguggagaggaaguggag

SEQ ID NO: 2632 - RNA, 21 nt, Artificial sequence
  specific aptamers
ggaaguggagaggaaguggcg

SEQ ID NO: 2633 - RNA, 21 nt, Artificial sequence
  specific aptamers
ggaaguggagaggaaguggug

SEQ ID NO: 2634 - RNA, 21 nt, Artificial sequence
  specific aptamers
ggaaguggagaggaugaggag

SEQ ID NO: 2635 - RNA, 21 nt, Artificial sequence
  specific aptamers
ggaaguggagaggaugaggcg

SEQ ID NO: 2636 - RNA, 21 nt, Artificial sequence
  specific aptamers
ggaaguggagaggaugaggug

SEQ ID NO: 2637 - RNA, 21 nt, Artificial sequence
  specific aptamers
ggaaguggagaggaugcggag

SEQ ID NO: 2638 - RNA, 21 nt, Artificial sequence
  specific aptamers
ggaaguggagaggaugcggcg

SEQ ID NO: 2639 - RNA, 21 nt, Artificial sequence
  specific aptamers
ggaaguggagaggaugcggug

SEQ ID NO: 2640 - RNA, 21 nt, Artificial sequence
  specific aptamers
ggaaguggagaggauguggag

SEQ ID NO: 2641 - RNA, 21 nt, Artificial sequence
  specific aptamers
ggaaguggagaggauguggcg

SEQ ID NO: 2642 - RNA, 21 nt, Artificial sequence
  specific aptamers
ggaaguggagaggauguggug

SEQ ID NO: 2643 - RNA, 20 nt, Artificial sequence
  specific aptamers
ggaaguggagaggagaggag

SEQ ID NO: 2644 - RNA, 20 nt, Artificial sequence
  specific aptamers
ggaaguggagaggagaggcg

SEQ ID NO: 2645 - RNA, 20 nt, Artificial sequence
  specific aptamers
ggaaguggagaggagaggug

SEQ ID NO: 2646 - RNA, 20 nt, Artificial sequence
  specific aptamers
ggaaguggagaggagcggag

SEQ ID NO: 2647 - RNA, 20 nt, Artificial sequence
  specific aptamers
ggaaguggagaggagcggcg

SEQ ID NO: 2648 - RNA, 20 nt, Artificial sequence
  specific aptamers
ggaaguggagaggagcggug

SEQ ID NO: 2649 - RNA, 20 nt, Artificial sequence
  specific aptamers
ggaaguggagaggaguggag

SEQ ID NO: 2650 - RNA, 20 nt, Artificial sequence
  specific aptamers
ggaaguggagaggaguggcg

SEQ ID NO: 2651 - RNA, 20 nt, Artificial sequence
  specific aptamers
ggaaguggagaggaguggug

SEQ ID NO: 2652 - RNA, 21 nt, Artificial sequence
  specific aptamers
ggaaguggagagguagaggag

SEQ ID NO: 2653 - RNA, 21 nt, Artificial sequence
  specific aptamers
ggaaguggagagguagaggcg

SEQ ID NO: 2654 - RNA, 21 nt, Artificial sequence
  specific aptamers
ggaaguggagagguagaggug

SEQ ID NO: 2655 - RNA, 21 nt, Artificial sequence
  specific aptamers
ggaaguggagagguagcggag

SEQ ID NO: 2656 - RNA, 21 nt, Artificial sequence
  specific aptamers
ggaaguggagagguagcggcg

SEQ ID NO: 2657 - RNA, 21 nt, Artificial sequence
  specific aptamers
ggaaguggagagguagcggug

SEQ ID NO: 2658 - RNA, 21 nt, Artificial sequence
  specific aptamers
ggaaguggagagguaguggag

SEQ ID NO: 2659 - RNA, 21 nt, Artificial sequence
  specific aptamers
ggaaguggagagguaguggcg

SEQ ID NO: 2660 - RNA, 21 nt, Artificial sequence
  specific aptamers
ggaaguggagagguaguggug

SEQ ID NO: 2661 - RNA, 21 nt, Artificial sequence
  specific aptamers
ggaaguggagagguugaggag

SEQ ID NO: 2662 - RNA, 21 nt, Artificial sequence
  specific aptamers
ggaaguggagagguugaggcg

SEQ ID NO: 2663 - RNA, 21 nt, Artificial sequence
  specific aptamers
ggaaguggagagguugaggug

SEQ ID NO: 2664 - RNA, 21 nt, Artificial sequence
  specific aptamers
ggaaguggagagguugcggag

SEQ ID NO: 2665 - RNA, 21 nt, Artificial sequence
  specific aptamers
ggaaguggagagguugcggcg

SEQ ID NO: 2666 - RNA, 21 nt, Artificial sequence
  specific aptamers
ggaaguggagagguugcggug

SEQ ID NO: 2667 - RNA, 21 nt, Artificial sequence
  specific aptamers
ggaaguggagagguuguggag

SEQ ID NO: 2668 - RNA, 21 nt, Artificial sequence
  specific aptamers
ggaaguggagagguuguggcg

SEQ ID NO: 2669 - RNA, 21 nt, Artificial sequence
  specific aptamers
ggaaguggagagguuguggug

SEQ ID NO: 2670 - RNA, 20 nt, Artificial sequence
  specific aptamers
ggaaguggagaggugaggag

SEQ ID NO: 2671 - RNA, 20 nt, Artificial sequence
  specific aptamers
ggaaguggagaggugaggcg

SEQ ID NO: 2672 - RNA, 20 nt, Artificial sequence
  specific aptamers
ggaaguggagaggugaggug

SEQ ID NO: 2673 - RNA, 20 nt, Artificial sequence
  specific aptamers
ggaaguggagaggugcggag

SEQ ID NO: 2674 - RNA, 20 nt, Artificial sequence
  specific aptamers
ggaaguggagaggugcggcg

SEQ ID NO: 2675 - RNA, 20 nt, Artificial sequence
  specific aptamers
ggaaguggagaggugcggug

SEQ ID NO: 2676 - RNA, 20 nt, Artificial sequence
  specific aptamers
ggaaguggagagguguggag

SEQ ID NO: 2677 - RNA, 20 nt, Artificial sequence
  specific aptamers
ggaaguggagagguguggcg

SEQ ID NO: 2678 - RNA, 20 nt, Artificial sequence
  specific aptamers
ggaaguggagagguguggug

SEQ ID NO: 2679 - RNA, 21 nt, Artificial sequence
  specific aptamers
ggaaguggaguggaagaggag

SEQ ID NO: 2680 - RNA, 21 nt, Artificial sequence
  specific aptamers
ggaaguggaguggaagaggcg

SEQ ID NO: 2681 - RNA, 21 nt, Artificial sequence
  specific aptamers
ggaaguggaguggaagaggug

SEQ ID NO: 2682 - RNA, 21 nt, Artificial sequence
  specific aptamers
ggaaguggaguggaagcggag

SEQ ID NO: 2683 - RNA, 21 nt, Artificial sequence
  specific aptamers
ggaaguggaguggaagcggcg

SEQ ID NO: 2684 - RNA, 21 nt, Artificial sequence
  specific aptamers
ggaaguggaguggaagcggug

SEQ ID NO: 2685 - RNA, 21 nt, Artificial sequence
  specific aptamers
ggaaguggaguggaaguggag

SEQ ID NO: 2686 - RNA, 21 nt, Artificial sequence
  specific aptamers
ggaaguggaguggaaguggcg

SEQ ID NO: 2687 - RNA, 21 nt, Artificial sequence
  specific aptamers
ggaaguggaguggaaguggug

SEQ ID NO: 2688 - RNA, 21 nt, Artificial sequence
  specific aptamers
ggaaguggaguggaugaggag

SEQ ID NO: 2689 - RNA, 21 nt, Artificial sequence
  specific aptamers
ggaaguggaguggaugaggcg

SEQ ID NO: 2690 - RNA, 21 nt, Artificial sequence
  specific aptamers
ggaaguggaguggaugaggug

SEQ ID NO: 2691 - RNA, 21 nt, Artificial sequence
  specific aptamers
ggaaguggaguggaugcggag

SEQ ID NO: 2692 - RNA, 21 nt, Artificial sequence
  specific aptamers
ggaaguggaguggaugcggcg

SEQ ID NO: 2693 - RNA, 21 nt, Artificial sequence
  specific aptamers
ggaaguggaguggaugcggug

SEQ ID NO: 2694 - RNA, 21 nt, Artificial sequence
  specific aptamers
ggaaguggaguggauguggag

SEQ ID NO: 2695 - RNA, 21 nt, Artificial sequence
  specific aptamers
ggaaguggaguggauguggcg

SEQ ID NO: 2696 - RNA, 21 nt, Artificial sequence
  specific aptamers
ggaaguggaguggauguggug

SEQ ID NO: 2697 - RNA, 20 nt, Artificial sequence
  specific aptamers
ggaaguggaguggagaggag

SEQ ID NO: 2698 - RNA, 20 nt, Artificial sequence
  specific aptamers
ggaaguggaguggagaggcg

SEQ ID NO: 2699 - RNA, 20 nt, Artificial sequence
  specific aptamers
ggaaguggaguggagaggug

SEQ ID NO: 2700 - RNA, 20 nt, Artificial sequence
  specific aptamers
ggaaguggaguggagcggag

SEQ ID NO: 2701 - RNA, 20 nt, Artificial sequence
  specific aptamers
ggaaguggaguggagcggcg

SEQ ID NO: 2702 - RNA, 20 nt, Artificial sequence
  specific aptamers
ggaaguggaguggagcggug

SEQ ID NO: 2703 - RNA, 20 nt, Artificial sequence
  specific aptamers
ggaaguggaguggaguggag

SEQ ID NO: 2704 - RNA, 20 nt, Artificial sequence
  specific aptamers
ggaaguggaguggaguggcg

SEQ ID NO: 2705 - RNA, 20 nt, Artificial sequence
  specific aptamers
ggaaguggaguggaguggug

SEQ ID NO: 2706 - RNA, 21 nt, Artificial sequence
  specific aptamers
ggaaguggagugguagaggag

SEQ ID NO: 2707 - RNA, 21 nt, Artificial sequence
  specific aptamers
ggaaguggagugguagaggcg

SEQ ID NO: 2708 - RNA, 21 nt, Artificial sequence
  specific aptamers
ggaaguggagugguagaggug

SEQ ID NO: 2709 - RNA, 21 nt, Artificial sequence
  specific aptamers
ggaaguggagugguagcggag

SEQ ID NO: 2710 - RNA, 21 nt, Artificial sequence
  specific aptamers
ggaaguggagugguagcggcg

SEQ ID NO: 2711 - RNA, 21 nt, Artificial sequence
  specific aptamers
ggaaguggagugguagcggug

SEQ ID NO: 2712 - RNA, 21 nt, Artificial sequence
  specific aptamers
ggaaguggagugguaguggag

SEQ ID NO: 2713 - RNA, 21 nt, Artificial sequence
  specific aptamers
ggaaguggagugguaguggcg

SEQ ID NO: 2714 - RNA, 21 nt, Artificial sequence
  specific aptamers
ggaaguggagugguaguggug

SEQ ID NO: 2715 - RNA, 21 nt, Artificial sequence
  specific aptamers
ggaaguggagugguugaggag

SEQ ID NO: 2716 - RNA, 21 nt, Artificial sequence
  specific aptamers
ggaaguggagugguugaggcg

SEQ ID NO: 2717 - RNA, 21 nt, Artificial sequence
  specific aptamers
ggaaguggagugguugaggug

SEQ ID NO: 2718 - RNA, 21 nt, Artificial sequence
  specific aptamers
ggaaguggagugguugcggag

SEQ ID NO: 2719 - RNA, 21 nt, Artificial sequence
  specific aptamers
ggaaguggagugguugcggcg

SEQ ID NO: 2720 - RNA, 21 nt, Artificial sequence
  specific aptamers
ggaaguggagugguugcggug

SEQ ID NO: 2721 - RNA, 21 nt, Artificial sequence
  specific aptamers
ggaaguggagugguuguggag

SEQ ID NO: 2722 - RNA, 21 nt, Artificial sequence
  specific aptamers
ggaaguggagugguuguggcg

SEQ ID NO: 2723 - RNA, 21 nt, Artificial sequence
  specific aptamers
ggaaguggagugguuguggug

SEQ ID NO: 2724 - RNA, 20 nt, Artificial sequence
  specific aptamers
ggaaguggaguggugaggag

SEQ ID NO: 2725 - RNA, 20 nt, Artificial sequence
  specific aptamers
ggaaguggaguggugaggcg

SEQ ID NO: 2726 - RNA, 20 nt, Artificial sequence
  specific aptamers
ggaaguggaguggugaggug

SEQ ID NO: 2727 - RNA, 20 nt, Artificial sequence
  specific aptamers
ggaaguggaguggugcggag

SEQ ID NO: 2728 - RNA, 20 nt, Artificial sequence
  specific aptamers
ggaaguggaguggugcggcg

SEQ ID NO: 2729 - RNA, 20 nt, Artificial sequence
  specific aptamers
ggaaguggaguggugcggug

SEQ ID NO: 2730 - RNA, 20 nt, Artificial sequence
  specific aptamers
ggaaguggagugguguggag

SEQ ID NO: 2731 - RNA, 20 nt, Artificial sequence
  specific aptamers
ggaaguggagugguguggcg

SEQ ID NO: 2732 - RNA, 20 nt, Artificial sequence
  specific aptamers
ggaaguggagugguguggug

SEQ ID NO: 2733 - RNA, 21 nt, Artificial sequence
  specific aptamers
ggaaguggugaggaagaggag

SEQ ID NO: 2734 - RNA, 21 nt, Artificial sequence
  specific aptamers
ggaaguggugaggaagaggcg

SEQ ID NO: 2735 - RNA, 21 nt, Artificial sequence
  specific aptamers
ggaaguggugaggaagaggug

SEQ ID NO: 2736 - RNA, 21 nt, Artificial sequence
  specific aptamers
ggaaguggugaggaagcggag

SEQ ID NO: 2737 - RNA, 21 nt, Artificial sequence
  specific aptamers
ggaaguggugaggaagcggcg

SEQ ID NO: 2738 - RNA, 21 nt, Artificial sequence
  specific aptamers
ggaaguggugaggaagcggug

SEQ ID NO: 2739 - RNA, 21 nt, Artificial sequence
  specific aptamers
ggaaguggugaggaaguggag

SEQ ID NO: 2740 - RNA, 21 nt, Artificial sequence
  specific aptamers
ggaaguggugaggaaguggcg

SEQ ID NO: 2741 - RNA, 21 nt, Artificial sequence
  specific aptamers
ggaaguggugaggaaguggug

SEQ ID NO: 2742 - RNA, 21 nt, Artificial sequence
  specific aptamers
ggaaguggugaggaugaggag

SEQ ID NO: 2743 - RNA, 21 nt, Artificial sequence
  specific aptamers
ggaaguggugaggaugaggcg

SEQ ID NO: 2744 - RNA, 21 nt, Artificial sequence
  specific aptamers
ggaaguggugaggaugaggug

SEQ ID NO: 2745 - RNA, 21 nt, Artificial sequence
  specific aptamers
ggaaguggugaggaugcggag

SEQ ID NO: 2746 - RNA, 21 nt, Artificial sequence
  specific aptamers
ggaaguggugaggaugcggcg

SEQ ID NO: 2747 - RNA, 21 nt, Artificial sequence
  specific aptamers
ggaaguggugaggaugcggug

SEQ ID NO: 2748 - RNA, 21 nt, Artificial sequence
  specific aptamers
ggaaguggugaggauguggag

SEQ ID NO: 2749 - RNA, 21 nt, Artificial sequence
  specific aptamers
ggaaguggugaggauguggcg

SEQ ID NO: 2750 - RNA, 21 nt, Artificial sequence
  specific aptamers
ggaaguggugaggauguggug

SEQ ID NO: 2751 - RNA, 20 nt, Artificial sequence
  specific aptamers
ggaaguggugaggagaggag

SEQ ID NO: 2752 - RNA, 20 nt, Artificial sequence
  specific aptamers
ggaaguggugaggagaggcg

SEQ ID NO: 2753 - RNA, 20 nt, Artificial sequence
  specific aptamers
ggaaguggugaggagaggug

SEQ ID NO: 2754 - RNA, 20 nt, Artificial sequence
  specific aptamers
ggaaguggugaggagcggag

SEQ ID NO: 2755 - RNA, 20 nt, Artificial sequence
  specific aptamers
ggaaguggugaggagcggcg

SEQ ID NO: 2756 - RNA, 20 nt, Artificial sequence
  specific aptamers
ggaaguggugaggagcggug

SEQ ID NO: 2757 - RNA, 20 nt, Artificial sequence
  specific aptamers
ggaaguggugaggaguggag

SEQ ID NO: 2758 - RNA, 20 nt, Artificial sequence
  specific aptamers
ggaaguggugaggaguggcg

SEQ ID NO: 2759 - RNA, 20 nt, Artificial sequence
  specific aptamers
ggaaguggugaggaguggug

SEQ ID NO: 2760 - RNA, 21 nt, Artificial sequence
  specific aptamers
ggaaguggugagguagaggag

SEQ ID NO: 2761 - RNA, 21 nt, Artificial sequence
  specific aptamers
ggaaguggugagguagaggcg

SEQ ID NO: 2762 - RNA, 21 nt, Artificial sequence
  specific aptamers
ggaaguggugagguagaggug

SEQ ID NO: 2763 - RNA, 21 nt, Artificial sequence
  specific aptamers
ggaaguggugagguagcggag

SEQ ID NO: 2764 - RNA, 21 nt, Artificial sequence
  specific aptamers
ggaaguggugagguagcggcg

SEQ ID NO: 2765 - RNA, 21 nt, Artificial sequence
  specific aptamers
ggaaguggugagguagcggug

SEQ ID NO: 2766 - RNA, 21 nt, Artificial sequence
  specific aptamers
ggaaguggugagguaguggag

SEQ ID NO: 2767 - RNA, 21 nt, Artificial sequence
  specific aptamers
ggaaguggugagguaguggcg

SEQ ID NO: 2768 - RNA, 21 nt, Artificial sequence
  specific aptamers
ggaaguggugagguaguggug

SEQ ID NO: 2769 - RNA, 21 nt, Artificial sequence
  specific aptamers
ggaaguggugagguugaggag

SEQ ID NO: 2770 - RNA, 21 nt, Artificial sequence
  specific aptamers
ggaaguggugagguugaggcg

SEQ ID NO: 2771 - RNA, 21 nt, Artificial sequence
  specific aptamers
ggaaguggugagguugaggug

SEQ ID NO: 2772 - RNA, 21 nt, Artificial sequence
  specific aptamers
ggaaguggugagguugcggag

SEQ ID NO: 2773 - RNA, 21 nt, Artificial sequence
  specific aptamers
ggaaguggugagguugcggcg

SEQ ID NO: 2774 - RNA, 21 nt, Artificial sequence
  specific aptamers
ggaaguggugagguugcggug

SEQ ID NO: 2775 - RNA, 21 nt, Artificial sequence
  specific aptamers
ggaaguggugagguuguggag

SEQ ID NO: 2776 - RNA, 21 nt, Artificial sequence
  specific aptamers
ggaaguggugagguuguggcg

SEQ ID NO: 2777 - RNA, 21 nt, Artificial sequence
  specific aptamers
ggaaguggugagguuguggug

SEQ ID NO: 2778 - RNA, 20 nt, Artificial sequence
  specific aptamers
ggaaguggugaggugaggag

SEQ ID NO: 2779 - RNA, 20 nt, Artificial sequence
  specific aptamers
ggaaguggugaggugaggcg

SEQ ID NO: 2780 - RNA, 20 nt, Artificial sequence
  specific aptamers
ggaaguggugaggugaggug

SEQ ID NO: 2781 - RNA, 20 nt, Artificial sequence
  specific aptamers
ggaaguggugaggugcggag

SEQ ID NO: 2782 - RNA, 20 nt, Artificial sequence
  specific aptamers
ggaaguggugaggugcggcg

SEQ ID NO: 2783 - RNA, 20 nt, Artificial sequence
  specific aptamers
ggaaguggugaggugcggug

SEQ ID NO: 2784 - RNA, 20 nt, Artificial sequence
  specific aptamers
ggaaguggugagguguggag

SEQ ID NO: 2785 - RNA, 20 nt, Artificial sequence
  specific aptamers
ggaaguggugagguguggcg

SEQ ID NO: 2786 - RNA, 20 nt, Artificial sequence
  specific aptamers
ggaaguggugagguguggug

SEQ ID NO: 2787 - RNA, 21 nt, Artificial sequence
  specific aptamers
ggaagugguguggaagaggag

SEQ ID NO: 2788 - RNA, 21 nt, Artificial sequence
  specific aptamers
ggaagugguguggaagaggcg

SEQ ID NO: 2789 - RNA, 21 nt, Artificial sequence
  specific aptamers
ggaagugguguggaagaggug

SEQ ID NO: 2790 - RNA, 21 nt, Artificial sequence
  specific aptamers
ggaagugguguggaagcggag

SEQ ID NO: 2791 - RNA, 21 nt, Artificial sequence
  specific aptamers
ggaagugguguggaagcggcg

SEQ ID NO: 2792 - RNA, 21 nt, Artificial sequence
  specific aptamers
ggaagugguguggaagcggug

SEQ ID NO: 2793 - RNA, 21 nt, Artificial sequence
  specific aptamers
ggaagugguguggaaguggag

SEQ ID NO: 2794 - RNA, 21 nt, Artificial sequence
  specific aptamers
ggaagugguguggaaguggcg

SEQ ID NO: 2795 - RNA, 21 nt, Artificial sequence
  specific aptamers
ggaagugguguggaaguggug

SEQ ID NO: 2796 - RNA, 21 nt, Artificial sequence
  specific aptamers
ggaagugguguggaugaggag

SEQ ID NO: 2797 - RNA, 21 nt, Artificial sequence
  specific aptamers
ggaagugguguggaugaggcg

SEQ ID NO: 2798 - RNA, 21 nt, Artificial sequence
  specific aptamers
ggaagugguguggaugaggug

SEQ ID NO: 2799 - RNA, 21 nt, Artificial sequence
  specific aptamers
ggaagugguguggaugcggag

SEQ ID NO: 2800 - RNA, 21 nt, Artificial sequence
  specific aptamers
ggaagugguguggaugcggcg

SEQ ID NO: 2801 - RNA, 21 nt, Artificial sequence
  specific aptamers
ggaagugguguggaugcggug

SEQ ID NO: 2802 - RNA, 21 nt, Artificial sequence
  specific aptamers
ggaagugguguggauguggag

SEQ ID NO: 2803 - RNA, 21 nt, Artificial sequence
  specific aptamers
ggaagugguguggauguggcg

SEQ ID NO: 2804 - RNA, 21 nt, Artificial sequence
  specific aptamers
ggaagugguguggauguggug

SEQ ID NO: 2805 - RNA, 20 nt, Artificial sequence
  specific aptamers
ggaagugguguggagaggag

SEQ ID NO: 2806 - RNA, 20 nt, Artificial sequence
  specific aptamers
ggaagugguguggagaggcg

SEQ ID NO: 2807 - RNA, 20 nt, Artificial sequence
  specific aptamers
ggaagugguguggagaggug

SEQ ID NO: 2808 - RNA, 20 nt, Artificial sequence
  specific aptamers
ggaagugguguggagcggag

SEQ ID NO: 2809 - RNA, 20 nt, Artificial sequence
  specific aptamers
ggaagugguguggagcggcg

SEQ ID NO: 2810 - RNA, 20 nt, Artificial sequence
  specific aptamers
ggaagugguguggagcggug

SEQ ID NO: 2811 - RNA, 20 nt, Artificial sequence
  specific aptamers
ggaagugguguggaguggag

SEQ ID NO: 2812 - RNA, 20 nt, Artificial sequence
  specific aptamers
ggaagugguguggaguggcg

SEQ ID NO: 2813 - RNA, 20 nt, Artificial sequence
  specific aptamers
ggaagugguguggaguggug

SEQ ID NO: 2814 - RNA, 21 nt, Artificial sequence
  specific aptamers
ggaaguggugugguagaggag

SEQ ID NO: 2815 - RNA, 21 nt, Artificial sequence
  specific aptamers
ggaaguggugugguagaggcg

SEQ ID NO: 2816 - RNA, 21 nt, Artificial sequence
  specific aptamers
ggaaguggugugguagaggug

SEQ ID NO: 2817 - RNA, 21 nt, Artificial sequence
  specific aptamers
ggaaguggugugguagcggag

SEQ ID NO: 2818 - RNA, 21 nt, Artificial sequence
  specific aptamers
ggaaguggugugguagcggcg

SEQ ID NO: 2819 - RNA, 21 nt, Artificial sequence
  specific aptamers
ggaaguggugugguagcggug

SEQ ID NO: 2820 - RNA, 21 nt, Artificial sequence
  specific aptamers
ggaaguggugugguaguggag

SEQ ID NO: 2821 - RNA, 21 nt, Artificial sequence
  specific aptamers
ggaaguggugugguaguggcg

SEQ ID NO: 2822 - RNA, 21 nt, Artificial sequence
  specific aptamers
ggaaguggugugguaguggug

SEQ ID NO: 2823 - RNA, 21 nt, Artificial sequence
  specific aptamers
ggaaguggugugguugaggag

SEQ ID NO: 2824 - RNA, 21 nt, Artificial sequence
  specific aptamers
ggaaguggugugguugaggcg

SEQ ID NO: 2825 - RNA, 21 nt, Artificial sequence
  specific aptamers
ggaaguggugugguugaggug

SEQ ID NO: 2826 - RNA, 21 nt, Artificial sequence
  specific aptamers
ggaaguggugugguugcggag

SEQ ID NO: 2827 - RNA, 21 nt, Artificial sequence
  specific aptamers
ggaaguggugugguugcggcg

SEQ ID NO: 2828 - RNA, 21 nt, Artificial sequence
  specific aptamers
ggaaguggugugguugcggug

SEQ ID NO: 2829 - RNA, 21 nt, Artificial sequence
  specific aptamers
ggaaguggugugguuguggag

SEQ ID NO: 2830 - RNA, 21 nt, Artificial sequence
  specific aptamers
ggaaguggugugguuguggcg

SEQ ID NO: 2831 - RNA, 21 nt, Artificial sequence
  specific aptamers
ggaaguggugugguuguggug

SEQ ID NO: 2832 - RNA, 20 nt, Artificial sequence
  specific aptamers
ggaagugguguggugaggag

SEQ ID NO: 2833 - RNA, 20 nt, Artificial sequence
  specific aptamers
ggaagugguguggugaggcg

SEQ ID NO: 2834 - RNA, 20 nt, Artificial sequence
  specific aptamers
ggaagugguguggugaggug

SEQ ID NO: 2835 - RNA, 20 nt, Artificial sequence
  specific aptamers
ggaagugguguggugcggag

SEQ ID NO: 2836 - RNA, 20 nt, Artificial sequence
  specific aptamers
ggaagugguguggugcggcg

SEQ ID NO: 2837 - RNA, 20 nt, Artificial sequence
  specific aptamers
ggaagugguguggugcggug

SEQ ID NO: 2838 - RNA, 20 nt, Artificial sequence
  specific aptamers
ggaaguggugugguguggag

SEQ ID NO: 2839 - RNA, 20 nt, Artificial sequence
  specific aptamers
ggaaguggugugguguggcg

SEQ ID NO: 2840 - RNA, 20 nt, Artificial sequence
  specific aptamers
ggaaguggugugguguggug

SEQ ID NO: 2841 - RNA, 21 nt, Artificial sequence
  specific aptamers
ggaugaggagaggaagaggag

SEQ ID NO: 2842 - RNA, 21 nt, Artificial sequence
  specific aptamers
ggaugaggagaggaagaggcg

SEQ ID NO: 2843 - RNA, 21 nt, Artificial sequence
  specific aptamers
ggaugaggagaggaagaggug

SEQ ID NO: 2844 - RNA, 21 nt, Artificial sequence
  specific aptamers
ggaugaggagaggaagcggag

SEQ ID NO: 2845 - RNA, 21 nt, Artificial sequence
  specific aptamers
ggaugaggagaggaagcggcg

SEQ ID NO: 2846 - RNA, 21 nt, Artificial sequence
  specific aptamers
ggaugaggagaggaagcggug

SEQ ID NO: 2847 - RNA, 21 nt, Artificial sequence
  specific aptamers
ggaugaggagaggaaguggag

SEQ ID NO: 2848 - RNA, 21 nt, Artificial sequence
  specific aptamers
ggaugaggagaggaaguggcg

SEQ ID NO: 2849 - RNA, 21 nt, Artificial sequence
  specific aptamers
ggaugaggagaggaaguggug

SEQ ID NO: 2850 - RNA, 21 nt, Artificial sequence
  specific aptamers
ggaugaggagaggaugaggag

SEQ ID NO: 2851 - RNA, 21 nt, Artificial sequence
  specific aptamers
ggaugaggagaggaugaggcg

SEQ ID NO: 2852 - RNA, 21 nt, Artificial sequence
  specific aptamers
ggaugaggagaggaugaggug

SEQ ID NO: 2853 - RNA, 21 nt, Artificial sequence
  specific aptamers
ggaugaggagaggaugcggag

SEQ ID NO: 2854 - RNA, 21 nt, Artificial sequence
  specific aptamers
ggaugaggagaggaugcggcg

SEQ ID NO: 2855 - RNA, 21 nt, Artificial sequence
  specific aptamers
ggaugaggagaggaugcggug

SEQ ID NO: 2856 - RNA, 21 nt, Artificial sequence
  specific aptamers
ggaugaggagaggauguggag

SEQ ID NO: 2857 - RNA, 21 nt, Artificial sequence
  specific aptamers
ggaugaggagaggauguggcg

SEQ ID NO: 2858 - RNA, 21 nt, Artificial sequence
  specific aptamers
ggaugaggagaggauguggug

SEQ ID NO: 2859 - RNA, 20 nt, Artificial sequence
  specific aptamers
ggaugaggagaggagaggag

SEQ ID NO: 2860 - RNA, 20 nt, Artificial sequence
  specific aptamers
ggaugaggagaggagaggcg

SEQ ID NO: 2861 - RNA, 20 nt, Artificial sequence
  specific aptamers
ggaugaggagaggagaggug

SEQ ID NO: 2862 - RNA, 20 nt, Artificial sequence
  specific aptamers
ggaugaggagaggagcggag

SEQ ID NO: 2863 - RNA, 20 nt, Artificial sequence
  specific aptamers
ggaugaggagaggagcggcg

SEQ ID NO: 2864 - RNA, 20 nt, Artificial sequence
  specific aptamers
ggaugaggagaggagcggug

SEQ ID NO: 2865 - RNA, 20 nt, Artificial sequence
  specific aptamers
ggaugaggagaggaguggag

SEQ ID NO: 2866 - RNA, 20 nt, Artificial sequence
  specific aptamers
ggaugaggagaggaguggcg

SEQ ID NO: 2867 - RNA, 20 nt, Artificial sequence
  specific aptamers
ggaugaggagaggaguggug

SEQ ID NO: 2868 - RNA, 21 nt, Artificial sequence
  specific aptamers
ggaugaggagagguagaggag

SEQ ID NO: 2869 - RNA, 21 nt, Artificial sequence
  specific aptamers
ggaugaggagagguagaggcg

SEQ ID NO: 2870 - RNA, 21 nt, Artificial sequence
  specific aptamers
ggaugaggagagguagaggug

SEQ ID NO: 2871 - RNA, 21 nt, Artificial sequence
  specific aptamers
ggaugaggagagguagcggag

SEQ ID NO: 2872 - RNA, 21 nt, Artificial sequence
  specific aptamers
ggaugaggagagguagcggcg

SEQ ID NO: 2873 - RNA, 21 nt, Artificial sequence
  specific aptamers
ggaugaggagagguagcggug

SEQ ID NO: 2874 - RNA, 21 nt, Artificial sequence
  specific aptamers
ggaugaggagagguaguggag

SEQ ID NO: 2875 - RNA, 21 nt, Artificial sequence
  specific aptamers
ggaugaggagagguaguggcg

SEQ ID NO: 2876 - RNA, 21 nt, Artificial sequence
  specific aptamers
ggaugaggagagguaguggug

SEQ ID NO: 2877 - RNA, 21 nt, Artificial sequence
  specific aptamers
ggaugaggagagguugaggag

SEQ ID NO: 2878 - RNA, 21 nt, Artificial sequence
  specific aptamers
ggaugaggagagguugaggcg

SEQ ID NO: 2879 - RNA, 21 nt, Artificial sequence
  specific aptamers
ggaugaggagagguugaggug

SEQ ID NO: 2880 - RNA, 21 nt, Artificial sequence
  specific aptamers
ggaugaggagagguugcggag

SEQ ID NO: 2881 - RNA, 21 nt, Artificial sequence
  specific aptamers
ggaugaggagagguugcggcg

SEQ ID NO: 2882 - RNA, 21 nt, Artificial sequence
  specific aptamers
ggaugaggagagguugcggug

SEQ ID NO: 2883 - RNA, 21 nt, Artificial sequence
  specific aptamers
ggaugaggagagguuguggag

SEQ ID NO: 2884 - RNA, 21 nt, Artificial sequence
  specific aptamers
ggaugaggagagguuguggcg

SEQ ID NO: 2885 - RNA, 21 nt, Artificial sequence
  specific aptamers
ggaugaggagagguuguggug

SEQ ID NO: 2886 - RNA, 20 nt, Artificial sequence
  specific aptamers
ggaugaggagaggugaggag

SEQ ID NO: 2887 - RNA, 20 nt, Artificial sequence
  specific aptamers
ggaugaggagaggugaggcg

SEQ ID NO: 2888 - RNA, 20 nt, Artificial sequence
  specific aptamers
ggaugaggagaggugaggug

SEQ ID NO: 2889 - RNA, 20 nt, Artificial sequence
  specific aptamers
ggaugaggagaggugcggag

SEQ ID NO: 2890 - RNA, 20 nt, Artificial sequence
  specific aptamers
ggaugaggagaggugcggcg

SEQ ID NO: 2891 - RNA, 20 nt, Artificial sequence
  specific aptamers
ggaugaggagaggugcggug

SEQ ID NO: 2892 - RNA, 20 nt, Artificial sequence
  specific aptamers
ggaugaggagagguguggag

SEQ ID NO: 2893 - RNA, 20 nt, Artificial sequence
  specific aptamers
ggaugaggagagguguggcg

SEQ ID NO: 2894 - RNA, 20 nt, Artificial sequence
  specific aptamers
ggaugaggagagguguggug

SEQ ID NO: 2895 - RNA, 21 nt, Artificial sequence
  specific aptamers
ggaugaggaguggaagaggag

SEQ ID NO: 2896 - RNA, 21 nt, Artificial sequence
  specific aptamers
ggaugaggaguggaagaggcg

SEQ ID NO: 2897 - RNA, 21 nt, Artificial sequence
  specific aptamers
ggaugaggaguggaagaggug

SEQ ID NO: 2898 - RNA, 21 nt, Artificial sequence
  specific aptamers
ggaugaggaguggaagcggag

SEQ ID NO: 2899 - RNA, 21 nt, Artificial sequence
  specific aptamers
ggaugaggaguggaagcggcg

SEQ ID NO: 2900 - RNA, 21 nt, Artificial sequence
  specific aptamers
ggaugaggaguggaagcggug

SEQ ID NO: 2901 - RNA, 21 nt, Artificial sequence
  specific aptamers
ggaugaggaguggaaguggag

SEQ ID NO: 2902 - RNA, 21 nt, Artificial sequence
  specific aptamers
ggaugaggaguggaaguggcg

SEQ ID NO: 2903 - RNA, 21 nt, Artificial sequence
  specific aptamers
ggaugaggaguggaaguggug

SEQ ID NO: 2904 - RNA, 21 nt, Artificial sequence
  specific aptamers
ggaugaggaguggaugaggag

SEQ ID NO: 2905 - RNA, 21 nt, Artificial sequence
  specific aptamers
ggaugaggaguggaugaggcg

SEQ ID NO: 2906 - RNA, 21 nt, Artificial sequence
  specific aptamers
ggaugaggaguggaugaggug

SEQ ID NO: 2907 - RNA, 21 nt, Artificial sequence
  specific aptamers
ggaugaggaguggaugcggag

SEQ ID NO: 2908 - RNA, 21 nt, Artificial sequence
  specific aptamers
ggaugaggaguggaugcggcg

SEQ ID NO: 2909 - RNA, 21 nt, Artificial sequence
  specific aptamers
ggaugaggaguggaugcggug

SEQ ID NO: 2910 - RNA, 21 nt, Artificial sequence
  specific aptamers
ggaugaggaguggauguggag

SEQ ID NO: 2911 - RNA, 21 nt, Artificial sequence
  specific aptamers
ggaugaggaguggauguggcg

SEQ ID NO: 2912 - RNA, 21 nt, Artificial sequence
  specific aptamers
ggaugaggaguggauguggug

SEQ ID NO: 2913 - RNA, 20 nt, Artificial sequence
  specific aptamers
ggaugaggaguggagaggag

SEQ ID NO: 2914 - RNA, 20 nt, Artificial sequence
  specific aptamers
ggaugaggaguggagaggcg

SEQ ID NO: 2915 - RNA, 20 nt, Artificial sequence
  specific aptamers
ggaugaggaguggagaggug

SEQ ID NO: 2916 - RNA, 20 nt, Artificial sequence
  specific aptamers
ggaugaggaguggagcggag

SEQ ID NO: 2917 - RNA, 20 nt, Artificial sequence
  specific aptamers
ggaugaggaguggagcggcg

SEQ ID NO: 2918 - RNA, 20 nt, Artificial sequence
  specific aptamers
ggaugaggaguggagcggug

SEQ ID NO: 2919 - RNA, 20 nt, Artificial sequence
  specific aptamers
ggaugaggaguggaguggag

SEQ ID NO: 2920 - RNA, 20 nt, Artificial sequence
  specific aptamers
ggaugaggaguggaguggcg

SEQ ID NO: 2921 - RNA, 20 nt, Artificial sequence
  specific aptamers
ggaugaggaguggaguggug

SEQ ID NO: 2922 - RNA, 21 nt, Artificial sequence
  specific aptamers
ggaugaggagugguagaggag

SEQ ID NO: 2923 - RNA, 21 nt, Artificial sequence
  specific aptamers
ggaugaggagugguagaggcg

SEQ ID NO: 2924 - RNA, 21 nt, Artificial sequence
  specific aptamers
ggaugaggagugguagaggug

SEQ ID NO: 2925 - RNA, 21 nt, Artificial sequence
  specific aptamers
ggaugaggagugguagcggag

SEQ ID NO: 2926 - RNA, 21 nt, Artificial sequence
  specific aptamers
ggaugaggagugguagcggcg

SEQ ID NO: 2927 - RNA, 21 nt, Artificial sequence
  specific aptamers
ggaugaggagugguagcggug

SEQ ID NO: 2928 - RNA, 21 nt, Artificial sequence
  specific aptamers
ggaugaggagugguaguggag

SEQ ID NO: 2929 - RNA, 21 nt, Artificial sequence
  specific aptamers
ggaugaggagugguaguggcg

SEQ ID NO: 2930 - RNA, 21 nt, Artificial sequence
  specific aptamers
ggaugaggagugguaguggug

SEQ ID NO: 2931 - RNA, 21 nt, Artificial sequence
  specific aptamers
ggaugaggagugguugaggag

SEQ ID NO: 2932 - RNA, 21 nt, Artificial sequence
  specific aptamers
ggaugaggagugguugaggcg

SEQ ID NO: 2933 - RNA, 21 nt, Artificial sequence
  specific aptamers
ggaugaggagugguugaggug

SEQ ID NO: 2934 - RNA, 21 nt, Artificial sequence
  specific aptamers
ggaugaggagugguugcggag

SEQ ID NO: 2935 - RNA, 21 nt, Artificial sequence
  specific aptamers
ggaugaggagugguugcggcg

SEQ ID NO: 2936 - RNA, 21 nt, Artificial sequence
  specific aptamers
ggaugaggagugguugcggug

SEQ ID NO: 2937 - RNA, 21 nt, Artificial sequence
  specific aptamers
ggaugaggagugguuguggag

SEQ ID NO: 2938 - RNA, 21 nt, Artificial sequence
  specific aptamers
ggaugaggagugguuguggcg

SEQ ID NO: 2939 - RNA, 21 nt, Artificial sequence
  specific aptamers
ggaugaggagugguuguggug

SEQ ID NO: 2940 - RNA, 20 nt, Artificial sequence
  specific aptamers
ggaugaggaguggugaggag

SEQ ID NO: 2941 - RNA, 20 nt, Artificial sequence
  specific aptamers
ggaugaggaguggugaggcg

SEQ ID NO: 2942 - RNA, 20 nt, Artificial sequence
  specific aptamers
ggaugaggaguggugaggug

SEQ ID NO: 2943 - RNA, 20 nt, Artificial sequence
  specific aptamers
ggaugaggaguggugcggag

SEQ ID NO: 2944 - RNA, 20 nt, Artificial sequence
  specific aptamers
ggaugaggaguggugcggcg

SEQ ID NO: 2945 - RNA, 20 nt, Artificial sequence
  specific aptamers
ggaugaggaguggugcggug

SEQ ID NO: 2946 - RNA, 20 nt, Artificial sequence
  specific aptamers
ggaugaggagugguguggag

SEQ ID NO: 2947 - RNA, 20 nt, Artificial sequence
  specific aptamers
ggaugaggagugguguggcg

SEQ ID NO: 2948 - RNA, 20 nt, Artificial sequence
  specific aptamers
ggaugaggagugguguggug

SEQ ID NO: 2949 - RNA, 21 nt, Artificial sequence
  specific aptamers
ggaugaggugaggaagaggag

SEQ ID NO: 2950 - RNA, 21 nt, Artificial sequence
  specific aptamers
ggaugaggugaggaagaggcg

SEQ ID NO: 2951 - RNA, 21 nt, Artificial sequence
  specific aptamers
ggaugaggugaggaagaggug

SEQ ID NO: 2952 - RNA, 21 nt, Artificial sequence
  specific aptamers
ggaugaggugaggaagcggag

SEQ ID NO: 2953 - RNA, 21 nt, Artificial sequence
  specific aptamers
ggaugaggugaggaagcggcg

SEQ ID NO: 2954 - RNA, 21 nt, Artificial sequence
  specific aptamers
ggaugaggugaggaagcggug

SEQ ID NO: 2955 - RNA, 21 nt, Artificial sequence
  specific aptamers
ggaugaggugaggaaguggag

SEQ ID NO: 2956 - RNA, 21 nt, Artificial sequence
  specific aptamers
ggaugaggugaggaaguggcg

SEQ ID NO: 2957 - RNA, 21 nt, Artificial sequence
  specific aptamers
ggaugaggugaggaaguggug

SEQ ID NO: 2958 - RNA, 21 nt, Artificial sequence
  specific aptamers
ggaugaggugaggaugaggag

SEQ ID NO: 2959 - RNA, 21 nt, Artificial sequence
  specific aptamers
ggaugaggugaggaugaggcg

SEQ ID NO: 2960 - RNA, 21 nt, Artificial sequence
  specific aptamers
ggaugaggugaggaugaggug

SEQ ID NO: 2961 - RNA, 21 nt, Artificial sequence
  specific aptamers
ggaugaggugaggaugcggag

SEQ ID NO: 2962 - RNA, 21 nt, Artificial sequence
  specific aptamers
ggaugaggugaggaugcggcg

SEQ ID NO: 2963 - RNA, 21 nt, Artificial sequence
  specific aptamers
ggaugaggugaggaugcggug

SEQ ID NO: 2964 - RNA, 21 nt, Artificial sequence
  specific aptamers
ggaugaggugaggauguggag

SEQ ID NO: 2965 - RNA, 21 nt, Artificial sequence
  specific aptamers
ggaugaggugaggauguggcg

SEQ ID NO: 2966 - RNA, 21 nt, Artificial sequence
  specific aptamers
ggaugaggugaggauguggug

SEQ ID NO: 2967 - RNA, 20 nt, Artificial sequence
  specific aptamers
ggaugaggugaggagaggag

SEQ ID NO: 2968 - RNA, 20 nt, Artificial sequence
  specific aptamers
ggaugaggugaggagaggcg

SEQ ID NO: 2969 - RNA, 20 nt, Artificial sequence
  specific aptamers
ggaugaggugaggagaggug

SEQ ID NO: 2970 - RNA, 20 nt, Artificial sequence
  specific aptamers
ggaugaggugaggagcggag

SEQ ID NO: 2971 - RNA, 20 nt, Artificial sequence
  specific aptamers
ggaugaggugaggagcggcg

SEQ ID NO: 2972 - RNA, 20 nt, Artificial sequence
  specific aptamers
ggaugaggugaggagcggug

SEQ ID NO: 2973 - RNA, 20 nt, Artificial sequence
  specific aptamers
ggaugaggugaggaguggag

SEQ ID NO: 2974 - RNA, 20 nt, Artificial sequence
  specific aptamers
ggaugaggugaggaguggcg

SEQ ID NO: 2975 - RNA, 20 nt, Artificial sequence
  specific aptamers
ggaugaggugaggaguggug

SEQ ID NO: 2976 - RNA, 21 nt, Artificial sequence
  specific aptamers
ggaugaggugagguagaggag

SEQ ID NO: 2977 - RNA, 21 nt, Artificial sequence
  specific aptamers
ggaugaggugagguagaggcg

SEQ ID NO: 2978 - RNA, 21 nt, Artificial sequence
  specific aptamers
ggaugaggugagguagaggug

SEQ ID NO: 2979 - RNA, 21 nt, Artificial sequence
  specific aptamers
ggaugaggugagguagcggag

SEQ ID NO: 2980 - RNA, 21 nt, Artificial sequence
  specific aptamers
ggaugaggugagguagcggcg

SEQ ID NO: 2981 - RNA, 21 nt, Artificial sequence
  specific aptamers
ggaugaggugagguagcggug

SEQ ID NO: 2982 - RNA, 21 nt, Artificial sequence
  specific aptamers
ggaugaggugagguaguggag

SEQ ID NO: 2983 - RNA, 21 nt, Artificial sequence
  specific aptamers
ggaugaggugagguaguggcg

SEQ ID NO: 2984 - RNA, 21 nt, Artificial sequence
  specific aptamers
ggaugaggugagguaguggug

SEQ ID NO: 2985 - RNA, 21 nt, Artificial sequence
  specific aptamers
ggaugaggugagguugaggag

SEQ ID NO: 2986 - RNA, 21 nt, Artificial sequence
  specific aptamers
ggaugaggugagguugaggcg

SEQ ID NO: 2987 - RNA, 21 nt, Artificial sequence
  specific aptamers
ggaugaggugagguugaggug

SEQ ID NO: 2988 - RNA, 21 nt, Artificial sequence
  specific aptamers
ggaugaggugagguugcggag

SEQ ID NO: 2989 - RNA, 21 nt, Artificial sequence
  specific aptamers
ggaugaggugagguugcggcg

SEQ ID NO: 2990 - RNA, 21 nt, Artificial sequence
  specific aptamers
ggaugaggugagguugcggug

SEQ ID NO: 2991 - RNA, 21 nt, Artificial sequence
  specific aptamers
ggaugaggugagguuguggag

SEQ ID NO: 2992 - RNA, 21 nt, Artificial sequence
  specific aptamers
ggaugaggugagguuguggcg

SEQ ID NO: 2993 - RNA, 21 nt, Artificial sequence
  specific aptamers
ggaugaggugagguuguggug

SEQ ID NO: 2994 - RNA, 20 nt, Artificial sequence
  specific aptamers
ggaugaggugaggugaggag

SEQ ID NO: 2995 - RNA, 20 nt, Artificial sequence
  specific aptamers
ggaugaggugaggugaggcg

SEQ ID NO: 2996 - RNA, 20 nt, Artificial sequence
  specific aptamers
ggaugaggugaggugaggug

SEQ ID NO: 2997 - RNA, 20 nt, Artificial sequence
  specific aptamers
ggaugaggugaggugcggag

SEQ ID NO: 2998 - RNA, 20 nt, Artificial sequence
  specific aptamers
ggaugaggugaggugcggcg

SEQ ID NO: 2999 - RNA, 20 nt, Artificial sequence
  specific aptamers
ggaugaggugaggugcggug

SEQ ID NO: 3000 - RNA, 20 nt, Artificial sequence
  specific aptamers
ggaugaggugagguguggag

SEQ ID NO: 3001 - RNA, 20 nt, Artificial sequence
  specific aptamers
ggaugaggugagguguggcg

SEQ ID NO: 3002 - RNA, 20 nt, Artificial sequence
  specific aptamers
ggaugaggugagguguggug

SEQ ID NO: 3003 - RNA, 21 nt, Artificial sequence
  specific aptamers
ggaugagguguggaagaggag

SEQ ID NO: 3004 - RNA, 21 nt, Artificial sequence
  specific aptamers
ggaugagguguggaagaggcg

SEQ ID NO: 3005 - RNA, 21 nt, Artificial sequence
  specific aptamers
ggaugagguguggaagaggug

SEQ ID NO: 3006 - RNA, 21 nt, Artificial sequence
  specific aptamers
ggaugagguguggaagcggag

SEQ ID NO: 3007 - RNA, 21 nt, Artificial sequence
  specific aptamers
ggaugagguguggaagcggcg

SEQ ID NO: 3008 - RNA, 21 nt, Artificial sequence
  specific aptamers
ggaugagguguggaagcggug

SEQ ID NO: 3009 - RNA, 21 nt, Artificial sequence
  specific aptamers
ggaugagguguggaaguggag

SEQ ID NO: 3010 - RNA, 21 nt, Artificial sequence
  specific aptamers
ggaugagguguggaaguggcg

SEQ ID NO: 3011 - RNA, 21 nt, Artificial sequence
  specific aptamers
ggaugagguguggaaguggug

SEQ ID NO: 3012 - RNA, 21 nt, Artificial sequence
  specific aptamers
ggaugagguguggaugaggag

SEQ ID NO: 3013 - RNA, 21 nt, Artificial sequence
  specific aptamers
ggaugagguguggaugaggcg

SEQ ID NO: 3014 - RNA, 21 nt, Artificial sequence
  specific aptamers
ggaugagguguggaugaggug

SEQ ID NO: 3015 - RNA, 21 nt, Artificial sequence
  specific aptamers
ggaugagguguggaugcggag

SEQ ID NO: 3016 - RNA, 21 nt, Artificial sequence
  specific aptamers
ggaugagguguggaugcggcg

SEQ ID NO: 3017 - RNA, 21 nt, Artificial sequence
  specific aptamers
ggaugagguguggaugcggug

SEQ ID NO: 3018 - RNA, 21 nt, Artificial sequence
  specific aptamers
ggaugagguguggauguggag

SEQ ID NO: 3019 - RNA, 21 nt, Artificial sequence
  specific aptamers
ggaugagguguggauguggcg

SEQ ID NO: 3020 - RNA, 21 nt, Artificial sequence
  specific aptamers
ggaugagguguggauguggug

SEQ ID NO: 3021 - RNA, 20 nt, Artificial sequence
  specific aptamers
ggaugagguguggagaggag

SEQ ID NO: 3022 - RNA, 20 nt, Artificial sequence
  specific aptamers
ggaugagguguggagaggcg

SEQ ID NO: 3023 - RNA, 20 nt, Artificial sequence
  specific aptamers
ggaugagguguggagaggug

SEQ ID NO: 3024 - RNA, 20 nt, Artificial sequence
  specific aptamers
ggaugagguguggagcggag

SEQ ID NO: 3025 - RNA, 20 nt, Artificial sequence
  specific aptamers
ggaugagguguggagcggcg

SEQ ID NO: 3026 - RNA, 20 nt, Artificial sequence
  specific aptamers
ggaugagguguggagcggug

SEQ ID NO: 3027 - RNA, 20 nt, Artificial sequence
  specific aptamers
ggaugagguguggaguggag

SEQ ID NO: 3028 - RNA, 20 nt, Artificial sequence
  specific aptamers
ggaugagguguggaguggcg

SEQ ID NO: 3029 - RNA, 20 nt, Artificial sequence
  specific aptamers
ggaugagguguggaguggug

SEQ ID NO: 3030 - RNA, 21 nt, Artificial sequence
  specific aptamers
ggaugaggugugguagaggag

SEQ ID NO: 3031 - RNA, 21 nt, Artificial sequence
  specific aptamers
ggaugaggugugguagaggcg

SEQ ID NO: 3032 - RNA, 21 nt, Artificial sequence
  specific aptamers
ggaugaggugugguagaggug

SEQ ID NO: 3033 - RNA, 21 nt, Artificial sequence
  specific aptamers
ggaugaggugugguagcggag

SEQ ID NO: 3034 - RNA, 21 nt, Artificial sequence
  specific aptamers
ggaugaggugugguagcggcg

SEQ ID NO: 3035 - RNA, 21 nt, Artificial sequence
  specific aptamers
ggaugaggugugguagcggug

SEQ ID NO: 3036 - RNA, 21 nt, Artificial sequence
  specific aptamers
ggaugaggugugguaguggag

SEQ ID NO: 3037 - RNA, 21 nt, Artificial sequence
  specific aptamers
ggaugaggugugguaguggcg

SEQ ID NO: 3038 - RNA, 21 nt, Artificial sequence
  specific aptamers
ggaugaggugugguaguggug

SEQ ID NO: 3039 - RNA, 21 nt, Artificial sequence
  specific aptamers
ggaugaggugugguugaggag

SEQ ID NO: 3040 - RNA, 21 nt, Artificial sequence
  specific aptamers
ggaugaggugugguugaggcg

SEQ ID NO: 3041 - RNA, 21 nt, Artificial sequence
  specific aptamers
ggaugaggugugguugaggug

SEQ ID NO: 3042 - RNA, 21 nt, Artificial sequence
  specific aptamers
ggaugaggugugguugcggag

SEQ ID NO: 3043 - RNA, 21 nt, Artificial sequence
  specific aptamers
ggaugaggugugguugcggcg

SEQ ID NO: 3044 - RNA, 21 nt, Artificial sequence
  specific aptamers
ggaugaggugugguugcggug

SEQ ID NO: 3045 - RNA, 21 nt, Artificial sequence
  specific aptamers
ggaugaggugugguuguggag

SEQ ID NO: 3046 - RNA, 21 nt, Artificial sequence
  specific aptamers
ggaugaggugugguuguggcg

SEQ ID NO: 3047 - RNA, 21 nt, Artificial sequence
  specific aptamers
ggaugaggugugguuguggug

SEQ ID NO: 3048 - RNA, 20 nt, Artificial sequence
  specific aptamers
ggaugagguguggugaggag

SEQ ID NO: 3049 - RNA, 20 nt, Artificial sequence
  specific aptamers
ggaugagguguggugaggcg

SEQ ID NO: 3050 - RNA, 20 nt, Artificial sequence
  specific aptamers
ggaugagguguggugaggug

SEQ ID NO: 3051 - RNA, 20 nt, Artificial sequence
  specific aptamers
ggaugagguguggugcggag

SEQ ID NO: 3052 - RNA, 20 nt, Artificial sequence
  specific aptamers
ggaugagguguggugcggcg

SEQ ID NO: 3053 - RNA, 20 nt, Artificial sequence
  specific aptamers
ggaugagguguggugcggug

SEQ ID NO: 3054 - RNA, 20 nt, Artificial sequence
  specific aptamers
ggaugaggugugguguggag

SEQ ID NO: 3055 - RNA, 20 nt, Artificial sequence
  specific aptamers
ggaugaggugugguguggcg

SEQ ID NO: 3056 - RNA, 20 nt, Artificial sequence
  specific aptamers
ggaugaggugugguguggug

SEQ ID NO: 3057 - RNA, 21 nt, Artificial sequence
  specific aptamers
ggauguggagaggaagaggag

SEQ ID NO: 3058 - RNA, 21 nt, Artificial sequence
  specific aptamers
ggauguggagaggaagaggcg

SEQ ID NO: 3059 - RNA, 21 nt, Artificial sequence
  specific aptamers
ggauguggagaggaagaggug

SEQ ID NO: 3060 - RNA, 21 nt, Artificial sequence
  specific aptamers
ggauguggagaggaagcggag

SEQ ID NO: 3061 - RNA, 21 nt, Artificial sequence
  specific aptamers
ggauguggagaggaagcggcg

SEQ ID NO: 3062 - RNA, 21 nt, Artificial sequence
  specific aptamers
ggauguggagaggaagcggug

SEQ ID NO: 3063 - RNA, 21 nt, Artificial sequence
  specific aptamers
ggauguggagaggaaguggag

SEQ ID NO: 3064 - RNA, 21 nt, Artificial sequence
  specific aptamers
ggauguggagaggaaguggcg

SEQ ID NO: 3065 - RNA, 21 nt, Artificial sequence
  specific aptamers
ggauguggagaggaaguggug

SEQ ID NO: 3066 - RNA, 21 nt, Artificial sequence
  specific aptamers
ggauguggagaggaugaggag

SEQ ID NO: 3067 - RNA, 21 nt, Artificial sequence
  specific aptamers
ggauguggagaggaugaggcg

SEQ ID NO: 3068 - RNA, 21 nt, Artificial sequence
  specific aptamers
ggauguggagaggaugaggug

SEQ ID NO: 3069 - RNA, 21 nt, Artificial sequence
  specific aptamers
ggauguggagaggaugcggag

SEQ ID NO: 3070 - RNA, 21 nt, Artificial sequence
  specific aptamers
ggauguggagaggaugcggcg

SEQ ID NO: 3071 - RNA, 21 nt, Artificial sequence
  specific aptamers
ggauguggagaggaugcggug

SEQ ID NO: 3072 - RNA, 21 nt, Artificial sequence
  specific aptamers
ggauguggagaggauguggag

SEQ ID NO: 3073 - RNA, 21 nt, Artificial sequence
  specific aptamers
ggauguggagaggauguggcg

SEQ ID NO: 3074 - RNA, 21 nt, Artificial sequence
  specific aptamers
ggauguggagaggauguggug

SEQ ID NO: 3075 - RNA, 20 nt, Artificial sequence
  specific aptamers
ggauguggagaggagaggag

SEQ ID NO: 3076 - RNA, 20 nt, Artificial sequence
  specific aptamers
ggauguggagaggagaggcg

SEQ ID NO: 3077 - RNA, 20 nt, Artificial sequence
  specific aptamers
ggauguggagaggagaggug

SEQ ID NO: 3078 - RNA, 20 nt, Artificial sequence
  specific aptamers
ggauguggagaggagcggag

SEQ ID NO: 3079 - RNA, 20 nt, Artificial sequence
  specific aptamers
ggauguggagaggagcggcg

SEQ ID NO: 3080 - RNA, 20 nt, Artificial sequence
  specific aptamers
ggauguggagaggagcggug

SEQ ID NO: 3081 - RNA, 20 nt, Artificial sequence
  specific aptamers
ggauguggagaggaguggag

SEQ ID NO: 3082 - RNA, 20 nt, Artificial sequence
  specific aptamers
ggauguggagaggaguggcg

SEQ ID NO: 3083 - RNA, 20 nt, Artificial sequence
  specific aptamers
ggauguggagaggaguggug

SEQ ID NO: 3084 - RNA, 21 nt, Artificial sequence
  specific aptamers
ggauguggagagguagaggag

SEQ ID NO: 3085 - RNA, 21 nt, Artificial sequence
  specific aptamers
ggauguggagagguagaggcg

SEQ ID NO: 3086 - RNA, 21 nt, Artificial sequence
  specific aptamers
ggauguggagagguagaggug

SEQ ID NO: 3087 - RNA, 21 nt, Artificial sequence
  specific aptamers
ggauguggagagguagcggag

SEQ ID NO: 3088 - RNA, 21 nt, Artificial sequence
  specific aptamers
ggauguggagagguagcggcg

SEQ ID NO: 3089 - RNA, 21 nt, Artificial sequence
  specific aptamers
ggauguggagagguagcggug

SEQ ID NO: 3090 - RNA, 21 nt, Artificial sequence
  specific aptamers
ggauguggagagguaguggag

SEQ ID NO: 3091 - RNA, 21 nt, Artificial sequence
  specific aptamers
ggauguggagagguaguggcg

SEQ ID NO: 3092 - RNA, 21 nt, Artificial sequence
  specific aptamers
ggauguggagagguaguggug

SEQ ID NO: 3093 - RNA, 21 nt, Artificial sequence
  specific aptamers
ggauguggagagguugaggag

SEQ ID NO: 3094 - RNA, 21 nt, Artificial sequence
  specific aptamers
ggauguggagagguugaggcg

SEQ ID NO: 3095 - RNA, 21 nt, Artificial sequence
  specific aptamers
ggauguggagagguugaggug

SEQ ID NO: 3096 - RNA, 21 nt, Artificial sequence
  specific aptamers
ggauguggagagguugcggag

SEQ ID NO: 3097 - RNA, 21 nt, Artificial sequence
  specific aptamers
ggauguggagagguugcggcg

SEQ ID NO: 3098 - RNA, 21 nt, Artificial sequence
  specific aptamers
ggauguggagagguugcggug

SEQ ID NO: 3099 - RNA, 21 nt, Artificial sequence
  specific aptamers
ggauguggagagguuguggag

SEQ ID NO: 3100 - RNA, 21 nt, Artificial sequence
  specific aptamers
ggauguggagagguuguggcg

SEQ ID NO: 3101 - RNA, 21 nt, Artificial sequence
  specific aptamers
ggauguggagagguuguggug

SEQ ID NO: 3102 - RNA, 20 nt, Artificial sequence
  specific aptamers
ggauguggagaggugaggag

SEQ ID NO: 3103 - RNA, 20 nt, Artificial sequence
  specific aptamers
ggauguggagaggugaggcg

SEQ ID NO: 3104 - RNA, 20 nt, Artificial sequence
  specific aptamers
ggauguggagaggugaggug

SEQ ID NO: 3105 - RNA, 20 nt, Artificial sequence
  specific aptamers
ggauguggagaggugcggag

SEQ ID NO: 3106 - RNA, 20 nt, Artificial sequence
  specific aptamers
ggauguggagaggugcggcg

SEQ ID NO: 3107 - RNA, 20 nt, Artificial sequence
  specific aptamers
ggauguggagaggugcggug

SEQ ID NO: 3108 - RNA, 20 nt, Artificial sequence
  specific aptamers
ggauguggagagguguggag

SEQ ID NO: 3109 - RNA, 20 nt, Artificial sequence
  specific aptamers
ggauguggagagguguggcg

SEQ ID NO: 3110 - RNA, 20 nt, Artificial sequence
  specific aptamers
ggauguggagagguguggug

SEQ ID NO: 3111 - RNA, 21 nt, Artificial sequence
  specific aptamers
ggauguggaguggaagaggag

SEQ ID NO: 3112 - RNA, 21 nt, Artificial sequence
  specific aptamers
ggauguggaguggaagaggcg

SEQ ID NO: 3113 - RNA, 21 nt, Artificial sequence
  specific aptamers
ggauguggaguggaagaggug

SEQ ID NO: 3114 - RNA, 21 nt, Artificial sequence
  specific aptamers
ggauguggaguggaagcggag

SEQ ID NO: 3115 - RNA, 21 nt, Artificial sequence
  specific aptamers
ggauguggaguggaagcggcg

SEQ ID NO: 3116 - RNA, 21 nt, Artificial sequence
  specific aptamers
ggauguggaguggaagcggug

SEQ ID NO: 3117 - RNA, 21 nt, Artificial sequence
  specific aptamers
ggauguggaguggaaguggag

SEQ ID NO: 3118 - RNA, 21 nt, Artificial sequence
  specific aptamers
ggauguggaguggaaguggcg

SEQ ID NO: 3119 - RNA, 21 nt, Artificial sequence
  specific aptamers
ggauguggaguggaaguggug

SEQ ID NO: 3120 - RNA, 21 nt, Artificial sequence
  specific aptamers
ggauguggaguggaugaggag

SEQ ID NO: 3121 - RNA, 21 nt, Artificial sequence
  specific aptamers
ggauguggaguggaugaggcg

SEQ ID NO: 3122 - RNA, 21 nt, Artificial sequence
  specific aptamers
ggauguggaguggaugaggug

SEQ ID NO: 3123 - RNA, 21 nt, Artificial sequence
  specific aptamers
ggauguggaguggaugcggag

SEQ ID NO: 3124 - RNA, 21 nt, Artificial sequence
  specific aptamers
ggauguggaguggaugcggcg

SEQ ID NO: 3125 - RNA, 21 nt, Artificial sequence
  specific aptamers
ggauguggaguggaugcggug

SEQ ID NO: 3126 - RNA, 21 nt, Artificial sequence
  specific aptamers
ggauguggaguggauguggag

SEQ ID NO: 3127 - RNA, 21 nt, Artificial sequence
  specific aptamers
ggauguggaguggauguggcg

SEQ ID NO: 3128 - RNA, 21 nt, Artificial sequence
  specific aptamers
ggauguggaguggauguggug

SEQ ID NO: 3129 - RNA, 20 nt, Artificial sequence
  specific aptamers
ggauguggaguggagaggag

SEQ ID NO: 3130 - RNA, 20 nt, Artificial sequence
  specific aptamers
ggauguggaguggagaggcg

SEQ ID NO: 3131 - RNA, 20 nt, Artificial sequence
  specific aptamers
ggauguggaguggagaggug

SEQ ID NO: 3132 - RNA, 20 nt, Artificial sequence
  specific aptamers
ggauguggaguggagcggag

SEQ ID NO: 3133 - RNA, 20 nt, Artificial sequence
  specific aptamers
ggauguggaguggagcggcg

SEQ ID NO: 3134 - RNA, 20 nt, Artificial sequence
  specific aptamers
ggauguggaguggagcggug

SEQ ID NO: 3135 - RNA, 20 nt, Artificial sequence
  specific aptamers
ggauguggaguggaguggag

SEQ ID NO: 3136 - RNA, 20 nt, Artificial sequence
  specific aptamers
ggauguggaguggaguggcg

SEQ ID NO: 3137 - RNA, 20 nt, Artificial sequence
  specific aptamers
ggauguggaguggaguggug

SEQ ID NO: 3138 - RNA, 21 nt, Artificial sequence
  specific aptamers
ggauguggagugguagaggag

SEQ ID NO: 3139 - RNA, 21 nt, Artificial sequence
  specific aptamers
ggauguggagugguagaggcg

SEQ ID NO: 3140 - RNA, 21 nt, Artificial sequence
  specific aptamers
ggauguggagugguagaggug

SEQ ID NO: 3141 - RNA, 21 nt, Artificial sequence
  specific aptamers
ggauguggagugguagcggag

SEQ ID NO: 3142 - RNA, 21 nt, Artificial sequence
  specific aptamers
ggauguggagugguagcggcg

SEQ ID NO: 3143 - RNA, 21 nt, Artificial sequence
  specific aptamers
ggauguggagugguagcggug

SEQ ID NO: 3144 - RNA, 21 nt, Artificial sequence
  specific aptamers
ggauguggagugguaguggag

SEQ ID NO: 3145 - RNA, 21 nt, Artificial sequence
  specific aptamers
ggauguggagugguaguggcg

SEQ ID NO: 3146 - RNA, 21 nt, Artificial sequence
  specific aptamers
ggauguggagugguaguggug

SEQ ID NO: 3147 - RNA, 21 nt, Artificial sequence
  specific aptamers
ggauguggagugguugaggag

SEQ ID NO: 3148 - RNA, 21 nt, Artificial sequence
  specific aptamers
ggauguggagugguugaggcg

SEQ ID NO: 3149 - RNA, 21 nt, Artificial sequence
  specific aptamers
ggauguggagugguugaggug

SEQ ID NO: 3150 - RNA, 21 nt, Artificial sequence
  specific aptamers
ggauguggagugguugcggag

SEQ ID NO: 3151 - RNA, 21 nt, Artificial sequence
  specific aptamers
ggauguggagugguugcggcg

SEQ ID NO: 3152 - RNA, 21 nt, Artificial sequence
  specific aptamers
ggauguggagugguugcggug

SEQ ID NO: 3153 - RNA, 21 nt, Artificial sequence
  specific aptamers
ggauguggagugguuguggag

SEQ ID NO: 3154 - RNA, 21 nt, Artificial sequence
  specific aptamers
ggauguggagugguuguggcg

SEQ ID NO: 3155 - RNA, 21 nt, Artificial sequence
  specific aptamers
ggauguggagugguuguggug

SEQ ID NO: 3156 - RNA, 20 nt, Artificial sequence
  specific aptamers
ggauguggaguggugaggag

SEQ ID NO: 3157 - RNA, 20 nt, Artificial sequence
  specific aptamers
ggauguggaguggugaggcg

SEQ ID NO: 3158 - RNA, 20 nt, Artificial sequence
  specific aptamers
ggauguggaguggugaggug

SEQ ID NO: 3159 - RNA, 20 nt, Artificial sequence
  specific aptamers
ggauguggaguggugcggag

SEQ ID NO: 3160 - RNA, 20 nt, Artificial sequence
  specific aptamers
ggauguggaguggugcggcg

SEQ ID NO: 3161 - RNA, 20 nt, Artificial sequence
  specific aptamers
ggauguggaguggugcggug

SEQ ID NO: 3162 - RNA, 20 nt, Artificial sequence
  specific aptamers
ggauguggagugguguggag

SEQ ID NO: 3163 - RNA, 20 nt, Artificial sequence
  specific aptamers
ggauguggagugguguggcg

SEQ ID NO: 3164 - RNA, 20 nt, Artificial sequence
  specific aptamers
ggauguggagugguguggug

SEQ ID NO: 3165 - RNA, 21 nt, Artificial sequence
  specific aptamers
ggauguggugaggaagaggag

SEQ ID NO: 3166 - RNA, 21 nt, Artificial sequence
  specific aptamers
ggauguggugaggaagaggcg

SEQ ID NO: 3167 - RNA, 21 nt, Artificial sequence
  specific aptamers
ggauguggugaggaagaggug

SEQ ID NO: 3168 - RNA, 21 nt, Artificial sequence
  specific aptamers
ggauguggugaggaagcggag

SEQ ID NO: 3169 - RNA, 21 nt, Artificial sequence
  specific aptamers
ggauguggugaggaagcggcg

SEQ ID NO: 3170 - RNA, 21 nt, Artificial sequence
  specific aptamers
ggauguggugaggaagcggug

SEQ ID NO: 3171 - RNA, 21 nt, Artificial sequence
  specific aptamers
ggauguggugaggaaguggag

SEQ ID NO: 3172 - RNA, 21 nt, Artificial sequence
  specific aptamers
ggauguggugaggaaguggcg

SEQ ID NO: 3173 - RNA, 21 nt, Artificial sequence
  specific aptamers
ggauguggugaggaaguggug

SEQ ID NO: 3174 - RNA, 21 nt, Artificial sequence
  specific aptamers
ggauguggugaggaugaggag

SEQ ID NO: 3175 - RNA, 21 nt, Artificial sequence
  specific aptamers
ggauguggugaggaugaggcg

SEQ ID NO: 3176 - RNA, 21 nt, Artificial sequence
  specific aptamers
ggauguggugaggaugaggug

SEQ ID NO: 3177 - RNA, 21 nt, Artificial sequence
  specific aptamers
ggauguggugaggaugcggag

SEQ ID NO: 3178 - RNA, 21 nt, Artificial sequence
  specific aptamers
ggauguggugaggaugcggcg

SEQ ID NO: 3179 - RNA, 21 nt, Artificial sequence
  specific aptamers
ggauguggugaggaugcggug

SEQ ID NO: 3180 - RNA, 21 nt, Artificial sequence
  specific aptamers
ggauguggugaggauguggag

SEQ ID NO: 3181 - RNA, 21 nt, Artificial sequence
  specific aptamers
ggauguggugaggauguggcg

SEQ ID NO: 3182 - RNA, 21 nt, Artificial sequence
  specific aptamers
ggauguggugaggauguggug

SEQ ID NO: 3183 - RNA, 20 nt, Artificial sequence
  specific aptamers
ggauguggugaggagaggag

SEQ ID NO: 3184 - RNA, 20 nt, Artificial sequence
  specific aptamers
ggauguggugaggagaggcg

SEQ ID NO: 3185 - RNA, 20 nt, Artificial sequence
  specific aptamers
ggauguggugaggagaggug

SEQ ID NO: 3186 - RNA, 20 nt, Artificial sequence
  specific aptamers
ggauguggugaggagcggag

SEQ ID NO: 3187 - RNA, 20 nt, Artificial sequence
  specific aptamers
ggauguggugaggagcggcg

SEQ ID NO: 3188 - RNA, 20 nt, Artificial sequence
  specific aptamers
ggauguggugaggagcggug

SEQ ID NO: 3189 - RNA, 20 nt, Artificial sequence
  specific aptamers
ggauguggugaggaguggag

SEQ ID NO: 3190 - RNA, 20 nt, Artificial sequence
  specific aptamers
ggauguggugaggaguggcg

SEQ ID NO: 3191 - RNA, 20 nt, Artificial sequence
  specific aptamers
ggauguggugaggaguggug

SEQ ID NO: 3192 - RNA, 21 nt, Artificial sequence
  specific aptamers
ggauguggugagguagaggag

SEQ ID NO: 3193 - RNA, 21 nt, Artificial sequence
  specific aptamers
ggauguggugagguagaggcg

SEQ ID NO: 3194 - RNA, 21 nt, Artificial sequence
  specific aptamers
ggauguggugagguagaggug

SEQ ID NO: 3195 - RNA, 21 nt, Artificial sequence
  specific aptamers
ggauguggugagguagcggag

SEQ ID NO: 3196 - RNA, 21 nt, Artificial sequence
  specific aptamers
ggauguggugagguagcggcg

SEQ ID NO: 3197 - RNA, 21 nt, Artificial sequence
  specific aptamers
ggauguggugagguagcggug

SEQ ID NO: 3198 - RNA, 21 nt, Artificial sequence
  specific aptamers
ggauguggugagguaguggag

SEQ ID NO: 3199 - RNA, 21 nt, Artificial sequence
  specific aptamers
ggauguggugagguaguggcg

SEQ ID NO: 3200 - RNA, 21 nt, Artificial sequence
  specific aptamers
ggauguggugagguaguggug

SEQ ID NO: 3201 - RNA, 21 nt, Artificial sequence
  specific aptamers
ggauguggugagguugaggag

SEQ ID NO: 3202 - RNA, 21 nt, Artificial sequence
  specific aptamers
ggauguggugagguugaggcg

SEQ ID NO: 3203 - RNA, 21 nt, Artificial sequence
  specific aptamers
ggauguggugagguugaggug

SEQ ID NO: 3204 - RNA, 21 nt, Artificial sequence
  specific aptamers
ggauguggugagguugcggag

SEQ ID NO: 3205 - RNA, 21 nt, Artificial sequence
  specific aptamers
ggauguggugagguugcggcg

SEQ ID NO: 3206 - RNA, 21 nt, Artificial sequence
  specific aptamers
ggauguggugagguugcggug

SEQ ID NO: 3207 - RNA, 21 nt, Artificial sequence
  specific aptamers
ggauguggugagguuguggag

SEQ ID NO: 3208 - RNA, 21 nt, Artificial sequence
  specific aptamers
ggauguggugagguuguggcg

SEQ ID NO: 3209 - RNA, 21 nt, Artificial sequence
  specific aptamers
ggauguggugagguuguggug

SEQ ID NO: 3210 - RNA, 20 nt, Artificial sequence
  specific aptamers
ggauguggugaggugaggag

SEQ ID NO: 3211 - RNA, 20 nt, Artificial sequence
  specific aptamers
ggauguggugaggugaggcg

SEQ ID NO: 3212 - RNA, 20 nt, Artificial sequence
  specific aptamers
ggauguggugaggugaggug

SEQ ID NO: 3213 - RNA, 20 nt, Artificial sequence
  specific aptamers
ggauguggugaggugcggag

SEQ ID NO: 3214 - RNA, 20 nt, Artificial sequence
  specific aptamers
ggauguggugaggugcggcg

SEQ ID NO: 3215 - RNA, 20 nt, Artificial sequence
  specific aptamers
ggauguggugaggugcggug

SEQ ID NO: 3216 - RNA, 20 nt, Artificial sequence
  specific aptamers
ggauguggugagguguggag

SEQ ID NO: 3217 - RNA, 20 nt, Artificial sequence
  specific aptamers
ggauguggugagguguggcg

SEQ ID NO: 3218 - RNA, 20 nt, Artificial sequence
  specific aptamers
ggauguggugagguguggug

SEQ ID NO: 3219 - RNA, 21 nt, Artificial sequence
  specific aptamers
ggaugugguguggaagaggag

SEQ ID NO: 3220 - RNA, 21 nt, Artificial sequence
  specific aptamers
ggaugugguguggaagaggcg

SEQ ID NO: 3221 - RNA, 21 nt, Artificial sequence
  specific aptamers
ggaugugguguggaagaggug

SEQ ID NO: 3222 - RNA, 21 nt, Artificial sequence
  specific aptamers
ggaugugguguggaagcggag

SEQ ID NO: 3223 - RNA, 21 nt, Artificial sequence
  specific aptamers
ggaugugguguggaagcggcg

SEQ ID NO: 3224 - RNA, 21 nt, Artificial sequence
  specific aptamers
ggaugugguguggaagcggug

SEQ ID NO: 3225 - RNA, 21 nt, Artificial sequence
  specific aptamers
ggaugugguguggaaguggag

SEQ ID NO: 3226 - RNA, 21 nt, Artificial sequence
  specific aptamers
ggaugugguguggaaguggcg

SEQ ID NO: 3227 - RNA, 21 nt, Artificial sequence
  specific aptamers
ggaugugguguggaaguggug

SEQ ID NO: 3228 - RNA, 21 nt, Artificial sequence
  specific aptamers
ggaugugguguggaugaggag

SEQ ID NO: 3229 - RNA, 21 nt, Artificial sequence
  specific aptamers
ggaugugguguggaugaggcg

SEQ ID NO: 3230 - RNA, 21 nt, Artificial sequence
  specific aptamers
ggaugugguguggaugaggug

SEQ ID NO: 3231 - RNA, 21 nt, Artificial sequence
  specific aptamers
ggaugugguguggaugcggag

SEQ ID NO: 3232 - RNA, 21 nt, Artificial sequence
  specific aptamers
ggaugugguguggaugcggcg

SEQ ID NO: 3233 - RNA, 21 nt, Artificial sequence
  specific aptamers
ggaugugguguggaugcggug

SEQ ID NO: 3234 - RNA, 21 nt, Artificial sequence
  specific aptamers
ggaugugguguggauguggag

SEQ ID NO: 3235 - RNA, 21 nt, Artificial sequence
  specific aptamers
ggaugugguguggauguggcg

SEQ ID NO: 3236 - RNA, 21 nt, Artificial sequence
  specific aptamers
ggaugugguguggauguggug

SEQ ID NO: 3237 - RNA, 20 nt, Artificial sequence
  specific aptamers
ggaugugguguggagaggag

SEQ ID NO: 3238 - RNA, 20 nt, Artificial sequence
  specific aptamers
ggaugugguguggagaggcg

SEQ ID NO: 3239 - RNA, 20 nt, Artificial sequence
  specific aptamers
ggaugugguguggagaggug

SEQ ID NO: 3240 - RNA, 20 nt, Artificial sequence
  specific aptamers
ggaugugguguggagcggag

SEQ ID NO: 3241 - RNA, 20 nt, Artificial sequence
  specific aptamers
ggaugugguguggagcggcg

SEQ ID NO: 3242 - RNA, 20 nt, Artificial sequence
  specific aptamers
ggaugugguguggagcggug

SEQ ID NO: 3243 - RNA, 20 nt, Artificial sequence
  specific aptamers
ggaugugguguggaguggag

SEQ ID NO: 3244 - RNA, 20 nt, Artificial sequence
  specific aptamers
ggaugugguguggaguggcg

SEQ ID NO: 3245 - RNA, 20 nt, Artificial sequence
  specific aptamers
ggaugugguguggaguggug

SEQ ID NO: 3246 - RNA, 21 nt, Artificial sequence
  specific aptamers
ggauguggugugguagaggag

SEQ ID NO: 3247 - RNA, 21 nt, Artificial sequence
  specific aptamers
ggauguggugugguagaggcg

SEQ ID NO: 3248 - RNA, 21 nt, Artificial sequence
  specific aptamers
ggauguggugugguagaggug

SEQ ID NO: 3249 - RNA, 21 nt, Artificial sequence
  specific aptamers
ggauguggugugguagcggag

SEQ ID NO: 3250 - RNA, 21 nt, Artificial sequence
  specific aptamers
ggauguggugugguagcggcg

SEQ ID NO: 3251 - RNA, 21 nt, Artificial sequence
  specific aptamers
ggauguggugugguagcggug

SEQ ID NO: 3252 - RNA, 21 nt, Artificial sequence
  specific aptamers
ggauguggugugguaguggag

SEQ ID NO: 3253 - RNA, 21 nt, Artificial sequence
  specific aptamers
ggauguggugugguaguggcg

SEQ ID NO: 3254 - RNA, 21 nt, Artificial sequence
  specific aptamers
ggauguggugugguaguggug

SEQ ID NO: 3255 - RNA, 21 nt, Artificial sequence
  specific aptamers
ggauguggugugguugaggag

SEQ ID NO: 3256 - RNA, 21 nt, Artificial sequence
  specific aptamers
ggauguggugugguugaggcg

SEQ ID NO: 3257 - RNA, 21 nt, Artificial sequence
  specific aptamers
ggauguggugugguugaggug

SEQ ID NO: 3258 - RNA, 21 nt, Artificial sequence
  specific aptamers
ggauguggugugguugcggag

SEQ ID NO: 3259 - RNA, 21 nt, Artificial sequence
  specific aptamers
ggauguggugugguugcggcg

SEQ ID NO: 3260 - RNA, 21 nt, Artificial sequence
  specific aptamers
ggauguggugugguugcggug

SEQ ID NO: 3261 - RNA, 21 nt, Artificial sequence
  specific aptamers
ggauguggugugguuguggag

SEQ ID NO: 3262 - RNA, 21 nt, Artificial sequence
  specific aptamers
ggauguggugugguuguggcg

SEQ ID NO: 3263 - RNA, 21 nt, Artificial sequence
  specific aptamers
ggauguggugugguuguggug

SEQ ID NO: 3264 - RNA, 20 nt, Artificial sequence
  specific aptamers
ggaugugguguggugaggag

SEQ ID NO: 3265 - RNA, 20 nt, Artificial sequence
  specific aptamers
ggaugugguguggugaggcg

SEQ ID NO: 3266 - RNA, 20 nt, Artificial sequence
  specific aptamers
ggaugugguguggugaggug

SEQ ID NO: 3267 - RNA, 20 nt, Artificial sequence
  specific aptamers
ggaugugguguggugcggag

SEQ ID NO: 3268 - RNA, 20 nt, Artificial sequence
  specific aptamers
ggaugugguguggugcggcg

SEQ ID NO: 3269 - RNA, 20 nt, Artificial sequence
  specific aptamers
ggaugugguguggugcggug

SEQ ID NO: 3270 - RNA, 20 nt, Artificial sequence
  specific aptamers
ggauguggugugguguggag

SEQ ID NO: 3271 - RNA, 20 nt, Artificial sequence
  specific aptamers
ggauguggugugguguggcg

SEQ ID NO: 3272 - RNA, 20 nt, Artificial sequence
  specific aptamers
ggauguggugugguguggug

SEQ ID NO: 3273 - RNA, 21 nt, Artificial sequence
  specific aptamers
ggcagaggagaggaagaggag

SEQ ID NO: 3274 - RNA, 21 nt, Artificial sequence
  specific aptamers
ggcagaggagaggaagaggcg

SEQ ID NO: 3275 - RNA, 21 nt, Artificial sequence
  specific aptamers
ggcagaggagaggaagaggug

SEQ ID NO: 3276 - RNA, 21 nt, Artificial sequence
  specific aptamers
ggcagaggagaggaagcggag

SEQ ID NO: 3277 - RNA, 21 nt, Artificial sequence
  specific aptamers
ggcagaggagaggaagcggcg

SEQ ID NO: 3278 - RNA, 21 nt, Artificial sequence
  specific aptamers
ggcagaggagaggaagcggug

SEQ ID NO: 3279 - RNA, 21 nt, Artificial sequence
  specific aptamers
ggcagaggagaggaaguggag

SEQ ID NO: 3280 - RNA, 21 nt, Artificial sequence
  specific aptamers
ggcagaggagaggaaguggcg

SEQ ID NO: 3281 - RNA, 21 nt, Artificial sequence
  specific aptamers
ggcagaggagaggaaguggug

SEQ ID NO: 3282 - RNA, 21 nt, Artificial sequence
  specific aptamers
ggcagaggagaggaugaggag

SEQ ID NO: 3283 - RNA, 21 nt, Artificial sequence
  specific aptamers
ggcagaggagaggaugaggcg

SEQ ID NO: 3284 - RNA, 21 nt, Artificial sequence
  specific aptamers
ggcagaggagaggaugaggug

SEQ ID NO: 3285 - RNA, 21 nt, Artificial sequence
  specific aptamers
ggcagaggagaggaugcggag

SEQ ID NO: 3286 - RNA, 21 nt, Artificial sequence
  specific aptamers
ggcagaggagaggaugcggcg

SEQ ID NO: 3287 - RNA, 21 nt, Artificial sequence
  specific aptamers
ggcagaggagaggaugcggug

SEQ ID NO: 3288 - RNA, 21 nt, Artificial sequence
  specific aptamers
ggcagaggagaggauguggag

SEQ ID NO: 3289 - RNA, 21 nt, Artificial sequence
  specific aptamers
ggcagaggagaggauguggcg

SEQ ID NO: 3290 - RNA, 21 nt, Artificial sequence
  specific aptamers
ggcagaggagaggauguggug

SEQ ID NO: 3291 - RNA, 20 nt, Artificial sequence
  specific aptamers
ggcagaggagaggagaggag

SEQ ID NO: 3292 - RNA, 20 nt, Artificial sequence
  specific aptamers
ggcagaggagaggagaggcg

SEQ ID NO: 3293 - RNA, 20 nt, Artificial sequence
  specific aptamers
ggcagaggagaggagaggug

SEQ ID NO: 3294 - RNA, 20 nt, Artificial sequence
  specific aptamers
ggcagaggagaggagcggag

SEQ ID NO: 3295 - RNA, 20 nt, Artificial sequence
  specific aptamers
ggcagaggagaggagcggcg

SEQ ID NO: 3296 - RNA, 20 nt, Artificial sequence
  specific aptamers
ggcagaggagaggagcggug

SEQ ID NO: 3297 - RNA, 20 nt, Artificial sequence
  specific aptamers
ggcagaggagaggaguggag

SEQ ID NO: 3298 - RNA, 20 nt, Artificial sequence
  specific aptamers
ggcagaggagaggaguggcg

SEQ ID NO: 3299 - RNA, 20 nt, Artificial sequence
  specific aptamers
ggcagaggagaggaguggug

SEQ ID NO: 3300 - RNA, 21 nt, Artificial sequence
  specific aptamers
ggcagaggagagguagaggag

SEQ ID NO: 3301 - RNA, 21 nt, Artificial sequence
  specific aptamers
ggcagaggagagguagaggcg

SEQ ID NO: 3302 - RNA, 21 nt, Artificial sequence
  specific aptamers
ggcagaggagagguagaggug

SEQ ID NO: 3303 - RNA, 21 nt, Artificial sequence
  specific aptamers
ggcagaggagagguagcggag

SEQ ID NO: 3304 - RNA, 21 nt, Artificial sequence
  specific aptamers
ggcagaggagagguagcggcg

SEQ ID NO: 3305 - RNA, 21 nt, Artificial sequence
  specific aptamers
ggcagaggagagguagcggug

SEQ ID NO: 3306 - RNA, 21 nt, Artificial sequence
  specific aptamers
ggcagaggagagguaguggag

SEQ ID NO: 3307 - RNA, 21 nt, Artificial sequence
  specific aptamers
ggcagaggagagguaguggcg

SEQ ID NO: 3308 - RNA, 21 nt, Artificial sequence
  specific aptamers
ggcagaggagagguaguggug

SEQ ID NO: 3309 - RNA, 21 nt, Artificial sequence
  specific aptamers
ggcagaggagagguugaggag

SEQ ID NO: 3310 - RNA, 21 nt, Artificial sequence
  specific aptamers
ggcagaggagagguugaggcg

SEQ ID NO: 3311 - RNA, 21 nt, Artificial sequence
  specific aptamers
ggcagaggagagguugaggug

SEQ ID NO: 3312 - RNA, 21 nt, Artificial sequence
  specific aptamers
ggcagaggagagguugcggag

SEQ ID NO: 3313 - RNA, 21 nt, Artificial sequence
  specific aptamers
ggcagaggagagguugcggcg

SEQ ID NO: 3314 - RNA, 21 nt, Artificial sequence
  specific aptamers
ggcagaggagagguugcggug

SEQ ID NO: 3315 - RNA, 21 nt, Artificial sequence
  specific aptamers
ggcagaggagagguuguggag

SEQ ID NO: 3316 - RNA, 21 nt, Artificial sequence
  specific aptamers
ggcagaggagagguuguggcg

SEQ ID NO: 3317 - RNA, 21 nt, Artificial sequence
  specific aptamers
ggcagaggagagguuguggug

SEQ ID NO: 3318 - RNA, 20 nt, Artificial sequence
  specific aptamers
ggcagaggagaggugaggag

SEQ ID NO: 3319 - RNA, 20 nt, Artificial sequence
  specific aptamers
ggcagaggagaggugaggcg

SEQ ID NO: 3320 - RNA, 20 nt, Artificial sequence
  specific aptamers
ggcagaggagaggugaggug

SEQ ID NO: 3321 - RNA, 20 nt, Artificial sequence
  specific aptamers
ggcagaggagaggugcggag

SEQ ID NO: 3322 - RNA, 20 nt, Artificial sequence
  specific aptamers
ggcagaggagaggugcggcg

SEQ ID NO: 3323 - RNA, 20 nt, Artificial sequence
  specific aptamers
ggcagaggagaggugcggug

SEQ ID NO: 3324 - RNA, 20 nt, Artificial sequence
  specific aptamers
ggcagaggagagguguggag

SEQ ID NO: 3325 - RNA, 20 nt, Artificial sequence
  specific aptamers
ggcagaggagagguguggcg

SEQ ID NO: 3326 - RNA, 20 nt, Artificial sequence
  specific aptamers
ggcagaggagagguguggug

SEQ ID NO: 3327 - RNA, 21 nt, Artificial sequence
  specific aptamers
ggcagaggaguggaagaggag

SEQ ID NO: 3328 - RNA, 21 nt, Artificial sequence
  specific aptamers
ggcagaggaguggaagaggcg

SEQ ID NO: 3329 - RNA, 21 nt, Artificial sequence
  specific aptamers
ggcagaggaguggaagaggug

SEQ ID NO: 3330 - RNA, 21 nt, Artificial sequence
  specific aptamers
ggcagaggaguggaagcggag

SEQ ID NO: 3331 - RNA, 21 nt, Artificial sequence
  specific aptamers
ggcagaggaguggaagcggcg

SEQ ID NO: 3332 - RNA, 21 nt, Artificial sequence
  specific aptamers
ggcagaggaguggaagcggug

SEQ ID NO: 3333 - RNA, 21 nt, Artificial sequence
  specific aptamers
ggcagaggaguggaaguggag

SEQ ID NO: 3334 - RNA, 21 nt, Artificial sequence
  specific aptamers
ggcagaggaguggaaguggcg

SEQ ID NO: 3335 - RNA, 21 nt, Artificial sequence
  specific aptamers
ggcagaggaguggaaguggug

SEQ ID NO: 3336 - RNA, 21 nt, Artificial sequence
  specific aptamers
ggcagaggaguggaugaggag

SEQ ID NO: 3337 - RNA, 21 nt, Artificial sequence
  specific aptamers
ggcagaggaguggaugaggcg

SEQ ID NO: 3338 - RNA, 21 nt, Artificial sequence
  specific aptamers
ggcagaggaguggaugaggug

SEQ ID NO: 3339 - RNA, 21 nt, Artificial sequence
  specific aptamers
ggcagaggaguggaugcggag

SEQ ID NO: 3340 - RNA, 21 nt, Artificial sequence
  specific aptamers
ggcagaggaguggaugcggcg

SEQ ID NO: 3341 - RNA, 21 nt, Artificial sequence
  specific aptamers
ggcagaggaguggaugcggug

SEQ ID NO: 3342 - RNA, 21 nt, Artificial sequence
  specific aptamers
ggcagaggaguggauguggag

SEQ ID NO: 3343 - RNA, 21 nt, Artificial sequence
  specific aptamers
ggcagaggaguggauguggcg

SEQ ID NO: 3344 - RNA, 21 nt, Artificial sequence
  specific aptamers
ggcagaggaguggauguggug

SEQ ID NO: 3345 - RNA, 20 nt, Artificial sequence
  specific aptamers
ggcagaggaguggagaggag

SEQ ID NO: 3346 - RNA, 20 nt, Artificial sequence
  specific aptamers
ggcagaggaguggagaggcg

SEQ ID NO: 3347 - RNA, 20 nt, Artificial sequence
  specific aptamers
ggcagaggaguggagaggug

SEQ ID NO: 3348 - RNA, 20 nt, Artificial sequence
  specific aptamers
ggcagaggaguggagcggag

SEQ ID NO: 3349 - RNA, 20 nt, Artificial sequence
  specific aptamers
ggcagaggaguggagcggcg

SEQ ID NO: 3350 - RNA, 20 nt, Artificial sequence
  specific aptamers
ggcagaggaguggagcggug

SEQ ID NO: 3351 - RNA, 20 nt, Artificial sequence
  specific aptamers
ggcagaggaguggaguggag

SEQ ID NO: 3352 - RNA, 20 nt, Artificial sequence
  specific aptamers
ggcagaggaguggaguggcg

SEQ ID NO: 3353 - RNA, 20 nt, Artificial sequence
  specific aptamers
ggcagaggaguggaguggug

SEQ ID NO: 3354 - RNA, 21 nt, Artificial sequence
  specific aptamers
ggcagaggagugguagaggag

SEQ ID NO: 3355 - RNA, 21 nt, Artificial sequence
  specific aptamers
ggcagaggagugguagaggcg

SEQ ID NO: 3356 - RNA, 21 nt, Artificial sequence
  specific aptamers
ggcagaggagugguagaggug

SEQ ID NO: 3357 - RNA, 21 nt, Artificial sequence
  specific aptamers
ggcagaggagugguagcggag

SEQ ID NO: 3358 - RNA, 21 nt, Artificial sequence
  specific aptamers
ggcagaggagugguagcggcg

SEQ ID NO: 3359 - RNA, 21 nt, Artificial sequence
  specific aptamers
ggcagaggagugguagcggug

SEQ ID NO: 3360 - RNA, 21 nt, Artificial sequence
  specific aptamers
ggcagaggagugguaguggag

SEQ ID NO: 3361 - RNA, 21 nt, Artificial sequence
  specific aptamers
ggcagaggagugguaguggcg

SEQ ID NO: 3362 - RNA, 21 nt, Artificial sequence
  specific aptamers
ggcagaggagugguaguggug

SEQ ID NO: 3363 - RNA, 21 nt, Artificial sequence
  specific aptamers
ggcagaggagugguugaggag

SEQ ID NO: 3364 - RNA, 21 nt, Artificial sequence
  specific aptamers
ggcagaggagugguugaggcg

SEQ ID NO: 3365 - RNA, 21 nt, Artificial sequence
  specific aptamers
ggcagaggagugguugaggug

SEQ ID NO: 3366 - RNA, 21 nt, Artificial sequence
  specific aptamers
ggcagaggagugguugcggag

SEQ ID NO: 3367 - RNA, 21 nt, Artificial sequence
  specific aptamers
ggcagaggagugguugcggcg

SEQ ID NO: 3368 - RNA, 21 nt, Artificial sequence
  specific aptamers
ggcagaggagugguugcggug

SEQ ID NO: 3369 - RNA, 21 nt, Artificial sequence
  specific aptamers
ggcagaggagugguuguggag

SEQ ID NO: 3370 - RNA, 21 nt, Artificial sequence
  specific aptamers
ggcagaggagugguuguggcg

SEQ ID NO: 3371 - RNA, 21 nt, Artificial sequence
  specific aptamers
ggcagaggagugguuguggug

SEQ ID NO: 3372 - RNA, 20 nt, Artificial sequence
  specific aptamers
ggcagaggaguggugaggag

SEQ ID NO: 3373 - RNA, 20 nt, Artificial sequence
  specific aptamers
ggcagaggaguggugaggcg

SEQ ID NO: 3374 - RNA, 20 nt, Artificial sequence
  specific aptamers
ggcagaggaguggugaggug

SEQ ID NO: 3375 - RNA, 20 nt, Artificial sequence
  specific aptamers
ggcagaggaguggugcggag

SEQ ID NO: 3376 - RNA, 20 nt, Artificial sequence
  specific aptamers
ggcagaggaguggugcggcg

SEQ ID NO: 3377 - RNA, 20 nt, Artificial sequence
  specific aptamers
ggcagaggaguggugcggug

SEQ ID NO: 3378 - RNA, 20 nt, Artificial sequence
  specific aptamers
ggcagaggagugguguggag

SEQ ID NO: 3379 - RNA, 20 nt, Artificial sequence
  specific aptamers
ggcagaggagugguguggcg

SEQ ID NO: 3380 - RNA, 20 nt, Artificial sequence
  specific aptamers
ggcagaggagugguguggug

SEQ ID NO: 3381 - RNA, 21 nt, Artificial sequence
  specific aptamers
ggcagaggugaggaagaggag

SEQ ID NO: 3382 - RNA, 21 nt, Artificial sequence
  specific aptamers
ggcagaggugaggaagaggcg

SEQ ID NO: 3383 - RNA, 21 nt, Artificial sequence
  specific aptamers
ggcagaggugaggaagaggug

SEQ ID NO: 3384 - RNA, 21 nt, Artificial sequence
  specific aptamers
ggcagaggugaggaagcggag

SEQ ID NO: 3385 - RNA, 21 nt, Artificial sequence
  specific aptamers
ggcagaggugaggaagcggcg

SEQ ID NO: 3386 - RNA, 21 nt, Artificial sequence
  specific aptamers
ggcagaggugaggaagcggug

SEQ ID NO: 3387 - RNA, 21 nt, Artificial sequence
  specific aptamers
ggcagaggugaggaaguggag

SEQ ID NO: 3388 - RNA, 21 nt, Artificial sequence
  specific aptamers
ggcagaggugaggaaguggcg

SEQ ID NO: 3389 - RNA, 21 nt, Artificial sequence
  specific aptamers
ggcagaggugaggaaguggug

SEQ ID NO: 3390 - RNA, 21 nt, Artificial sequence
  specific aptamers
ggcagaggugaggaugaggag

SEQ ID NO: 3391 - RNA, 21 nt, Artificial sequence
  specific aptamers
ggcagaggugaggaugaggcg

SEQ ID NO: 3392 - RNA, 21 nt, Artificial sequence
  specific aptamers
ggcagaggugaggaugaggug

SEQ ID NO: 3393 - RNA, 21 nt, Artificial sequence
  specific aptamers
ggcagaggugaggaugcggag

SEQ ID NO: 3394 - RNA, 21 nt, Artificial sequence
  specific aptamers
ggcagaggugaggaugcggcg

SEQ ID NO: 3395 - RNA, 21 nt, Artificial sequence
  specific aptamers
ggcagaggugaggaugcggug

SEQ ID NO: 3396 - RNA, 21 nt, Artificial sequence
  specific aptamers
ggcagaggugaggauguggag

SEQ ID NO: 3397 - RNA, 21 nt, Artificial sequence
  specific aptamers
ggcagaggugaggauguggcg

SEQ ID NO: 3398 - RNA, 21 nt, Artificial sequence
  specific aptamers
ggcagaggugaggauguggug

SEQ ID NO: 3399 - RNA, 20 nt, Artificial sequence
  specific aptamers
ggcagaggugaggagaggag

SEQ ID NO: 3400 - RNA, 20 nt, Artificial sequence
  specific aptamers
ggcagaggugaggagaggcg

SEQ ID NO: 3401 - RNA, 20 nt, Artificial sequence
  specific aptamers
ggcagaggugaggagaggug

SEQ ID NO: 3402 - RNA, 20 nt, Artificial sequence
  specific aptamers
ggcagaggugaggagcggag

SEQ ID NO: 3403 - RNA, 20 nt, Artificial sequence
  specific aptamers
ggcagaggugaggagcggcg

SEQ ID NO: 3404 - RNA, 20 nt, Artificial sequence
  specific aptamers
ggcagaggugaggagcggug

SEQ ID NO: 3405 - RNA, 20 nt, Artificial sequence
  specific aptamers
ggcagaggugaggaguggag

SEQ ID NO: 3406 - RNA, 20 nt, Artificial sequence
  specific aptamers
ggcagaggugaggaguggcg

SEQ ID NO: 3407 - RNA, 20 nt, Artificial sequence
  specific aptamers
ggcagaggugaggaguggug

SEQ ID NO: 3408 - RNA, 21 nt, Artificial sequence
  specific aptamers
ggcagaggugagguagaggag

SEQ ID NO: 3409 - RNA, 21 nt, Artificial sequence
  specific aptamers
ggcagaggugagguagaggcg

SEQ ID NO: 3410 - RNA, 21 nt, Artificial sequence
  specific aptamers
ggcagaggugagguagaggug

SEQ ID NO: 3411 - RNA, 21 nt, Artificial sequence
  specific aptamers
ggcagaggugagguagcggag

SEQ ID NO: 3412 - RNA, 21 nt, Artificial sequence
  specific aptamers
ggcagaggugagguagcggcg

SEQ ID NO: 3413 - RNA, 21 nt, Artificial sequence
  specific aptamers
ggcagaggugagguagcggug

SEQ ID NO: 3414 - RNA, 21 nt, Artificial sequence
  specific aptamers
ggcagaggugagguaguggag

SEQ ID NO: 3415 - RNA, 21 nt, Artificial sequence
  specific aptamers
ggcagaggugagguaguggcg

SEQ ID NO: 3416 - RNA, 21 nt, Artificial sequence
  specific aptamers
ggcagaggugagguaguggug

SEQ ID NO: 3417 - RNA, 21 nt, Artificial sequence
  specific aptamers
ggcagaggugagguugaggag

SEQ ID NO: 3418 - RNA, 21 nt, Artificial sequence
  specific aptamers
ggcagaggugagguugaggcg

SEQ ID NO: 3419 - RNA, 21 nt, Artificial sequence
  specific aptamers
ggcagaggugagguugaggug

SEQ ID NO: 3420 - RNA, 21 nt, Artificial sequence
  specific aptamers
ggcagaggugagguugcggag

SEQ ID NO: 3421 - RNA, 21 nt, Artificial sequence
  specific aptamers
ggcagaggugagguugcggcg

SEQ ID NO: 3422 - RNA, 21 nt, Artificial sequence
  specific aptamers
ggcagaggugagguugcggug

SEQ ID NO: 3423 - RNA, 21 nt, Artificial sequence
  specific aptamers
ggcagaggugagguuguggag

SEQ ID NO: 3424 - RNA, 21 nt, Artificial sequence
  specific aptamers
ggcagaggugagguuguggcg

SEQ ID NO: 3425 - RNA, 21 nt, Artificial sequence
  specific aptamers
ggcagaggugagguuguggug

SEQ ID NO: 3426 - RNA, 20 nt, Artificial sequence
  specific aptamers
ggcagaggugaggugaggag

SEQ ID NO: 3427 - RNA, 20 nt, Artificial sequence
  specific aptamers
ggcagaggugaggugaggcg

SEQ ID NO: 3428 - RNA, 20 nt, Artificial sequence
  specific aptamers
ggcagaggugaggugaggug

SEQ ID NO: 3429 - RNA, 20 nt, Artificial sequence
  specific aptamers
ggcagaggugaggugcggag

SEQ ID NO: 3430 - RNA, 20 nt, Artificial sequence
  specific aptamers
ggcagaggugaggugcggcg

SEQ ID NO: 3431 - RNA, 20 nt, Artificial sequence
  specific aptamers
ggcagaggugaggugcggug

SEQ ID NO: 3432 - RNA, 20 nt, Artificial sequence
  specific aptamers
ggcagaggugagguguggag

SEQ ID NO: 3433 - RNA, 20 nt, Artificial sequence
  specific aptamers
ggcagaggugagguguggcg

SEQ ID NO: 3434 - RNA, 20 nt, Artificial sequence
  specific aptamers
ggcagaggugagguguggug

SEQ ID NO: 3435 - RNA, 21 nt, Artificial sequence
  specific aptamers
ggcagagguguggaagaggag

SEQ ID NO: 3436 - RNA, 21 nt, Artificial sequence
  specific aptamers
ggcagagguguggaagaggcg

SEQ ID NO: 3437 - RNA, 21 nt, Artificial sequence
  specific aptamers
ggcagagguguggaagaggug

SEQ ID NO: 3438 - RNA, 21 nt, Artificial sequence
  specific aptamers
ggcagagguguggaagcggag

SEQ ID NO: 3439 - RNA, 21 nt, Artificial sequence
  specific aptamers
ggcagagguguggaagcggcg

SEQ ID NO: 3440 - RNA, 21 nt, Artificial sequence
  specific aptamers
ggcagagguguggaagcggug

SEQ ID NO: 3441 - RNA, 21 nt, Artificial sequence
  specific aptamers
ggcagagguguggaaguggag

SEQ ID NO: 3442 - RNA, 21 nt, Artificial sequence
  specific aptamers
ggcagagguguggaaguggcg

SEQ ID NO: 3443 - RNA, 21 nt, Artificial sequence
  specific aptamers
ggcagagguguggaaguggug

SEQ ID NO: 3444 - RNA, 21 nt, Artificial sequence
  specific aptamers
ggcagagguguggaugaggag

SEQ ID NO: 3445 - RNA, 21 nt, Artificial sequence
  specific aptamers
ggcagagguguggaugaggcg

SEQ ID NO: 3446 - RNA, 21 nt, Artificial sequence
  specific aptamers
ggcagagguguggaugaggug

SEQ ID NO: 3447 - RNA, 21 nt, Artificial sequence
  specific aptamers
ggcagagguguggaugcggag

SEQ ID NO: 3448 - RNA, 21 nt, Artificial sequence
  specific aptamers
ggcagagguguggaugcggcg

SEQ ID NO: 3449 - RNA, 21 nt, Artificial sequence
  specific aptamers
ggcagagguguggaugcggug

SEQ ID NO: 3450 - RNA, 21 nt, Artificial sequence
  specific aptamers
ggcagagguguggauguggag

SEQ ID NO: 3451 - RNA, 21 nt, Artificial sequence
  specific aptamers
ggcagagguguggauguggcg

SEQ ID NO: 3452 - RNA, 21 nt, Artificial sequence
  specific aptamers
ggcagagguguggauguggug

SEQ ID NO: 3453 - RNA, 20 nt, Artificial sequence
  specific aptamers
ggcagagguguggagaggag

SEQ ID NO: 3454 - RNA, 20 nt, Artificial sequence
  specific aptamers
ggcagagguguggagaggcg

SEQ ID NO: 3455 - RNA, 20 nt, Artificial sequence
  specific aptamers
ggcagagguguggagaggug

SEQ ID NO: 3456 - RNA, 20 nt, Artificial sequence
  specific aptamers
ggcagagguguggagcggag

SEQ ID NO: 3457 - RNA, 20 nt, Artificial sequence
  specific aptamers
ggcagagguguggagcggcg

SEQ ID NO: 3458 - RNA, 20 nt, Artificial sequence
  specific aptamers
ggcagagguguggagcggug

SEQ ID NO: 3459 - RNA, 20 nt, Artificial sequence
  specific aptamers
ggcagagguguggaguggag

SEQ ID NO: 3460 - RNA, 20 nt, Artificial sequence
  specific aptamers
ggcagagguguggaguggcg

SEQ ID NO: 3461 - RNA, 20 nt, Artificial sequence
  specific aptamers
ggcagagguguggaguggug

SEQ ID NO: 3462 - RNA, 21 nt, Artificial sequence
  specific aptamers
ggcagaggugugguagaggag

SEQ ID NO: 3463 - RNA, 21 nt, Artificial sequence
  specific aptamers
ggcagaggugugguagaggcg

SEQ ID NO: 3464 - RNA, 21 nt, Artificial sequence
  specific aptamers
ggcagaggugugguagaggug

SEQ ID NO: 3465 - RNA, 21 nt, Artificial sequence
  specific aptamers
ggcagaggugugguagcggag

SEQ ID NO: 3466 - RNA, 21 nt, Artificial sequence
  specific aptamers
ggcagaggugugguagcggcg

SEQ ID NO: 3467 - RNA, 21 nt, Artificial sequence
  specific aptamers
ggcagaggugugguagcggug

SEQ ID NO: 3468 - RNA, 21 nt, Artificial sequence
  specific aptamers
ggcagaggugugguaguggag

SEQ ID NO: 3469 - RNA, 21 nt, Artificial sequence
  specific aptamers
ggcagaggugugguaguggcg

SEQ ID NO: 3470 - RNA, 21 nt, Artificial sequence
  specific aptamers
ggcagaggugugguaguggug

SEQ ID NO: 3471 - RNA, 21 nt, Artificial sequence
  specific aptamers
ggcagaggugugguugaggag

SEQ ID NO: 3472 - RNA, 21 nt, Artificial sequence
  specific aptamers
ggcagaggugugguugaggcg

SEQ ID NO: 3473 - RNA, 21 nt, Artificial sequence
  specific aptamers
ggcagaggugugguugaggug

SEQ ID NO: 3474 - RNA, 21 nt, Artificial sequence
  specific aptamers
ggcagaggugugguugcggag

SEQ ID NO: 3475 - RNA, 21 nt, Artificial sequence
  specific aptamers
ggcagaggugugguugcggcg

SEQ ID NO: 3476 - RNA, 21 nt, Artificial sequence
  specific aptamers
ggcagaggugugguugcggug

SEQ ID NO: 3477 - RNA, 21 nt, Artificial sequence
  specific aptamers
ggcagaggugugguuguggag

SEQ ID NO: 3478 - RNA, 21 nt, Artificial sequence
  specific aptamers
ggcagaggugugguuguggcg

SEQ ID NO: 3479 - RNA, 21 nt, Artificial sequence
  specific aptamers
ggcagaggugugguuguggug

SEQ ID NO: 3480 - RNA, 20 nt, Artificial sequence
  specific aptamers
ggcagagguguggugaggag

SEQ ID NO: 3481 - RNA, 20 nt, Artificial sequence
  specific aptamers
ggcagagguguggugaggcg

SEQ ID NO: 3482 - RNA, 20 nt, Artificial sequence
  specific aptamers
ggcagagguguggugaggug

SEQ ID NO: 3483 - RNA, 20 nt, Artificial sequence
  specific aptamers
ggcagagguguggugcggag

SEQ ID NO: 3484 - RNA, 20 nt, Artificial sequence
  specific aptamers
ggcagagguguggugcggcg

SEQ ID NO: 3485 - RNA, 20 nt, Artificial sequence
  specific aptamers
ggcagagguguggugcggug

SEQ ID NO: 3486 - RNA, 20 nt, Artificial sequence
  specific aptamers
ggcagaggugugguguggag

SEQ ID NO: 3487 - RNA, 20 nt, Artificial sequence
  specific aptamers
ggcagaggugugguguggcg

SEQ ID NO: 3488 - RNA, 20 nt, Artificial sequence
  specific aptamers
ggcagaggugugguguggug

SEQ ID NO: 3489 - RNA, 21 nt, Artificial sequence
  specific aptamers
ggcaguggagaggaagaggag

SEQ ID NO: 3490 - RNA, 21 nt, Artificial sequence
  specific aptamers
ggcaguggagaggaagaggcg

SEQ ID NO: 3491 - RNA, 21 nt, Artificial sequence
  specific aptamers
ggcaguggagaggaagaggug

SEQ ID NO: 3492 - RNA, 21 nt, Artificial sequence
  specific aptamers
ggcaguggagaggaagcggag

SEQ ID NO: 3493 - RNA, 21 nt, Artificial sequence
  specific aptamers
ggcaguggagaggaagcggcg

SEQ ID NO: 3494 - RNA, 21 nt, Artificial sequence
  specific aptamers
ggcaguggagaggaagcggug

SEQ ID NO: 3495 - RNA, 21 nt, Artificial sequence
  specific aptamers
ggcaguggagaggaaguggag

SEQ ID NO: 3496 - RNA, 21 nt, Artificial sequence
  specific aptamers
ggcaguggagaggaaguggcg

SEQ ID NO: 3497 - RNA, 21 nt, Artificial sequence
  specific aptamers
ggcaguggagaggaaguggug

SEQ ID NO: 3498 - RNA, 21 nt, Artificial sequence
  specific aptamers
ggcaguggagaggaugaggag

SEQ ID NO: 3499 - RNA, 21 nt, Artificial sequence
  specific aptamers
ggcaguggagaggaugaggcg

SEQ ID NO: 3500 - RNA, 21 nt, Artificial sequence
  specific aptamers
ggcaguggagaggaugaggug

SEQ ID NO: 3501 - RNA, 21 nt, Artificial sequence
  specific aptamers
ggcaguggagaggaugcggag

SEQ ID NO: 3502 - RNA, 21 nt, Artificial sequence
  specific aptamers
ggcaguggagaggaugcggcg

SEQ ID NO: 3503 - RNA, 21 nt, Artificial sequence
  specific aptamers
ggcaguggagaggaugcggug

SEQ ID NO: 3504 - RNA, 21 nt, Artificial sequence
  specific aptamers
ggcaguggagaggauguggag

SEQ ID NO: 3505 - RNA, 21 nt, Artificial sequence
  specific aptamers
ggcaguggagaggauguggcg

SEQ ID NO: 3506 - RNA, 21 nt, Artificial sequence
  specific aptamers
ggcaguggagaggauguggug

SEQ ID NO: 3507 - RNA, 20 nt, Artificial sequence
  specific aptamers
ggcaguggagaggagaggag

SEQ ID NO: 3508 - RNA, 20 nt, Artificial sequence
  specific aptamers
ggcaguggagaggagaggcg

SEQ ID NO: 3509 - RNA, 20 nt, Artificial sequence
  specific aptamers
ggcaguggagaggagaggug

SEQ ID NO: 3510 - RNA, 20 nt, Artificial sequence
  specific aptamers
ggcaguggagaggagcggag

SEQ ID NO: 3511 - RNA, 20 nt, Artificial sequence
  specific aptamers
ggcaguggagaggagcggcg

SEQ ID NO: 3512 - RNA, 20 nt, Artificial sequence
  specific aptamers
ggcaguggagaggagcggug

SEQ ID NO: 3513 - RNA, 20 nt, Artificial sequence
  specific aptamers
ggcaguggagaggaguggag

SEQ ID NO: 3514 - RNA, 20 nt, Artificial sequence
  specific aptamers
ggcaguggagaggaguggcg

SEQ ID NO: 3515 - RNA, 20 nt, Artificial sequence
  specific aptamers
ggcaguggagaggaguggug

SEQ ID NO: 3516 - RNA, 21 nt, Artificial sequence
  specific aptamers
ggcaguggagagguagaggag

SEQ ID NO: 3517 - RNA, 21 nt, Artificial sequence
  specific aptamers
ggcaguggagagguagaggcg

SEQ ID NO: 3518 - RNA, 21 nt, Artificial sequence
  specific aptamers
ggcaguggagagguagaggug

SEQ ID NO: 3519 - RNA, 21 nt, Artificial sequence
  specific aptamers
ggcaguggagagguagcggag

SEQ ID NO: 3520 - RNA, 21 nt, Artificial sequence
  specific aptamers
ggcaguggagagguagcggcg

SEQ ID NO: 3521 - RNA, 21 nt, Artificial sequence
  specific aptamers
ggcaguggagagguagcggug

SEQ ID NO: 3522 - RNA, 21 nt, Artificial sequence
  specific aptamers
ggcaguggagagguaguggag

SEQ ID NO: 3523 - RNA, 21 nt, Artificial sequence
  specific aptamers
ggcaguggagagguaguggcg

SEQ ID NO: 3524 - RNA, 21 nt, Artificial sequence
  specific aptamers
ggcaguggagagguaguggug

SEQ ID NO: 3525 - RNA, 21 nt, Artificial sequence
  specific aptamers
ggcaguggagagguugaggag

SEQ ID NO: 3526 - RNA, 21 nt, Artificial sequence
  specific aptamers
ggcaguggagagguugaggcg

SEQ ID NO: 3527 - RNA, 21 nt, Artificial sequence
  specific aptamers
ggcaguggagagguugaggug

SEQ ID NO: 3528 - RNA, 21 nt, Artificial sequence
  specific aptamers
ggcaguggagagguugcggag

SEQ ID NO: 3529 - RNA, 21 nt, Artificial sequence
  specific aptamers
ggcaguggagagguugcggcg

SEQ ID NO: 3530 - RNA, 21 nt, Artificial sequence
  specific aptamers
ggcaguggagagguugcggug

SEQ ID NO: 3531 - RNA, 21 nt, Artificial sequence
  specific aptamers
ggcaguggagagguuguggag

SEQ ID NO: 3532 - RNA, 21 nt, Artificial sequence
  specific aptamers
ggcaguggagagguuguggcg

SEQ ID NO: 3533 - RNA, 21 nt, Artificial sequence
  specific aptamers
ggcaguggagagguuguggug

SEQ ID NO: 3534 - RNA, 20 nt, Artificial sequence
  specific aptamers
ggcaguggagaggugaggag

SEQ ID NO: 3535 - RNA, 20 nt, Artificial sequence
  specific aptamers
ggcaguggagaggugaggcg

SEQ ID NO: 3536 - RNA, 20 nt, Artificial sequence
  specific aptamers
ggcaguggagaggugaggug

SEQ ID NO: 3537 - RNA, 20 nt, Artificial sequence
  specific aptamers
ggcaguggagaggugcggag

SEQ ID NO: 3538 - RNA, 20 nt, Artificial sequence
  specific aptamers
ggcaguggagaggugcggcg

SEQ ID NO: 3539 - RNA, 20 nt, Artificial sequence
  specific aptamers
ggcaguggagaggugcggug

SEQ ID NO: 3540 - RNA, 20 nt, Artificial sequence
  specific aptamers
ggcaguggagagguguggag

SEQ ID NO: 3541 - RNA, 20 nt, Artificial sequence
  specific aptamers
ggcaguggagagguguggcg

SEQ ID NO: 3542 - RNA, 20 nt, Artificial sequence
  specific aptamers
ggcaguggagagguguggug

SEQ ID NO: 3543 - RNA, 21 nt, Artificial sequence
  specific aptamers
ggcaguggaguggaagaggag

SEQ ID NO: 3544 - RNA, 21 nt, Artificial sequence
  specific aptamers
ggcaguggaguggaagaggcg

SEQ ID NO: 3545 - RNA, 21 nt, Artificial sequence
  specific aptamers
ggcaguggaguggaagaggug

SEQ ID NO: 3546 - RNA, 21 nt, Artificial sequence
  specific aptamers
ggcaguggaguggaagcggag

SEQ ID NO: 3547 - RNA, 21 nt, Artificial sequence
  specific aptamers
ggcaguggaguggaagcggcg

SEQ ID NO: 3548 - RNA, 21 nt, Artificial sequence
  specific aptamers
ggcaguggaguggaagcggug

SEQ ID NO: 3549 - RNA, 21 nt, Artificial sequence
  specific aptamers
ggcaguggaguggaaguggag

SEQ ID NO: 3550 - RNA, 21 nt, Artificial sequence
  specific aptamers
ggcaguggaguggaaguggcg

SEQ ID NO: 3551 - RNA, 21 nt, Artificial sequence
  specific aptamers
ggcaguggaguggaaguggug

SEQ ID NO: 3552 - RNA, 21 nt, Artificial sequence
  specific aptamers
ggcaguggaguggaugaggag

SEQ ID NO: 3553 - RNA, 21 nt, Artificial sequence
  specific aptamers
ggcaguggaguggaugaggcg

SEQ ID NO: 3554 - RNA, 21 nt, Artificial sequence
  specific aptamers
ggcaguggaguggaugaggug

SEQ ID NO: 3555 - RNA, 21 nt, Artificial sequence
  specific aptamers
ggcaguggaguggaugcggag

SEQ ID NO: 3556 - RNA, 21 nt, Artificial sequence
  specific aptamers
ggcaguggaguggaugcggcg

SEQ ID NO: 3557 - RNA, 21 nt, Artificial sequence
  specific aptamers
ggcaguggaguggaugcggug

SEQ ID NO: 3558 - RNA, 21 nt, Artificial sequence
  specific aptamers
ggcaguggaguggauguggag

SEQ ID NO: 3559 - RNA, 21 nt, Artificial sequence
  specific aptamers
ggcaguggaguggauguggcg

SEQ ID NO: 3560 - RNA, 21 nt, Artificial sequence
  specific aptamers
ggcaguggaguggauguggug

SEQ ID NO: 3561 - RNA, 20 nt, Artificial sequence
  specific aptamers
ggcaguggaguggagaggag

SEQ ID NO: 3562 - RNA, 20 nt, Artificial sequence
  specific aptamers
ggcaguggaguggagaggcg

SEQ ID NO: 3563 - RNA, 20 nt, Artificial sequence
  specific aptamers
ggcaguggaguggagaggug

SEQ ID NO: 3564 - RNA, 20 nt, Artificial sequence
  specific aptamers
ggcaguggaguggagcggag

SEQ ID NO: 3565 - RNA, 20 nt, Artificial sequence
  specific aptamers
ggcaguggaguggagcggcg

SEQ ID NO: 3566 - RNA, 20 nt, Artificial sequence
  specific aptamers
ggcaguggaguggagcggug

SEQ ID NO: 3567 - RNA, 20 nt, Artificial sequence
  specific aptamers
ggcaguggaguggaguggag

SEQ ID NO: 3568 - RNA, 20 nt, Artificial sequence
  specific aptamers
ggcaguggaguggaguggcg

SEQ ID NO: 3569 - RNA, 20 nt, Artificial sequence
  specific aptamers
ggcaguggaguggaguggug

SEQ ID NO: 3570 - RNA, 21 nt, Artificial sequence
  specific aptamers
ggcaguggagugguagaggag

SEQ ID NO: 3571 - RNA, 21 nt, Artificial sequence
  specific aptamers
ggcaguggagugguagaggcg

SEQ ID NO: 3572 - RNA, 21 nt, Artificial sequence
  specific aptamers
ggcaguggagugguagaggug

SEQ ID NO: 3573 - RNA, 21 nt, Artificial sequence
  specific aptamers
ggcaguggagugguagcggag

SEQ ID NO: 3574 - RNA, 21 nt, Artificial sequence
  specific aptamers
ggcaguggagugguagcggcg

SEQ ID NO: 3575 - RNA, 21 nt, Artificial sequence
  specific aptamers
ggcaguggagugguagcggug

SEQ ID NO: 3576 - RNA, 21 nt, Artificial sequence
  specific aptamers
ggcaguggagugguaguggag

SEQ ID NO: 3577 - RNA, 21 nt, Artificial sequence
  specific aptamers
ggcaguggagugguaguggcg

SEQ ID NO: 3578 - RNA, 21 nt, Artificial sequence
  specific aptamers
ggcaguggagugguaguggug

SEQ ID NO: 3579 - RNA, 21 nt, Artificial sequence
  specific aptamers
ggcaguggagugguugaggag

SEQ ID NO: 3580 - RNA, 21 nt, Artificial sequence
  specific aptamers
ggcaguggagugguugaggcg

SEQ ID NO: 3581 - RNA, 21 nt, Artificial sequence
  specific aptamers
ggcaguggagugguugaggug

SEQ ID NO: 3582 - RNA, 21 nt, Artificial sequence
  specific aptamers
ggcaguggagugguugcggag

SEQ ID NO: 3583 - RNA, 21 nt, Artificial sequence
  specific aptamers
ggcaguggagugguugcggcg

SEQ ID NO: 3584 - RNA, 21 nt, Artificial sequence
  specific aptamers
ggcaguggagugguugcggug

SEQ ID NO: 3585 - RNA, 21 nt, Artificial sequence
  specific aptamers
ggcaguggagugguuguggag

SEQ ID NO: 3586 - RNA, 21 nt, Artificial sequence
  specific aptamers
ggcaguggagugguuguggcg

SEQ ID NO: 3587 - RNA, 21 nt, Artificial sequence
  specific aptamers
ggcaguggagugguuguggug

SEQ ID NO: 3588 - RNA, 20 nt, Artificial sequence
  specific aptamers
ggcaguggaguggugaggag

SEQ ID NO: 3589 - RNA, 20 nt, Artificial sequence
  specific aptamers
ggcaguggaguggugaggcg

SEQ ID NO: 3590 - RNA, 20 nt, Artificial sequence
  specific aptamers
ggcaguggaguggugaggug

SEQ ID NO: 3591 - RNA, 20 nt, Artificial sequence
  specific aptamers
ggcaguggaguggugcggag

SEQ ID NO: 3592 - RNA, 20 nt, Artificial sequence
  specific aptamers
ggcaguggaguggugcggcg

SEQ ID NO: 3593 - RNA, 20 nt, Artificial sequence
  specific aptamers
ggcaguggaguggugcggug

SEQ ID NO: 3594 - RNA, 20 nt, Artificial sequence
  specific aptamers
ggcaguggagugguguggag

SEQ ID NO: 3595 - RNA, 20 nt, Artificial sequence
  specific aptamers
ggcaguggagugguguggcg

SEQ ID NO: 3596 - RNA, 20 nt, Artificial sequence
  specific aptamers
ggcaguggagugguguggug

SEQ ID NO: 3597 - RNA, 21 nt, Artificial sequence
  specific aptamers
ggcaguggugaggaagaggag

SEQ ID NO: 3598 - RNA, 21 nt, Artificial sequence
  specific aptamers
ggcaguggugaggaagaggcg

SEQ ID NO: 3599 - RNA, 21 nt, Artificial sequence
  specific aptamers
ggcaguggugaggaagaggug

SEQ ID NO: 3600 - RNA, 21 nt, Artificial sequence
  specific aptamers
ggcaguggugaggaagcggag

SEQ ID NO: 3601 - RNA, 21 nt, Artificial sequence
  specific aptamers
ggcaguggugaggaagcggcg

SEQ ID NO: 3602 - RNA, 21 nt, Artificial sequence
  specific aptamers
ggcaguggugaggaagcggug

SEQ ID NO: 3603 - RNA, 21 nt, Artificial sequence
  specific aptamers
ggcaguggugaggaaguggag

SEQ ID NO: 3604 - RNA, 21 nt, Artificial sequence
  specific aptamers
ggcaguggugaggaaguggcg

SEQ ID NO: 3605 - RNA, 21 nt, Artificial sequence
  specific aptamers
ggcaguggugaggaaguggug

SEQ ID NO: 3606 - RNA, 21 nt, Artificial sequence
  specific aptamers
ggcaguggugaggaugaggag

SEQ ID NO: 3607 - RNA, 21 nt, Artificial sequence
  specific aptamers
ggcaguggugaggaugaggcg

SEQ ID NO: 3608 - RNA, 21 nt, Artificial sequence
  specific aptamers
ggcaguggugaggaugaggug

SEQ ID NO: 3609 - RNA, 21 nt, Artificial sequence
  specific aptamers
ggcaguggugaggaugcggag

SEQ ID NO: 3610 - RNA, 21 nt, Artificial sequence
  specific aptamers
ggcaguggugaggaugcggcg

SEQ ID NO: 3611 - RNA, 21 nt, Artificial sequence
  specific aptamers
ggcaguggugaggaugcggug

SEQ ID NO: 3612 - RNA, 21 nt, Artificial sequence
  specific aptamers
ggcaguggugaggauguggag

SEQ ID NO: 3613 - RNA, 21 nt, Artificial sequence
  specific aptamers
ggcaguggugaggauguggcg

SEQ ID NO: 3614 - RNA, 21 nt, Artificial sequence
  specific aptamers
ggcaguggugaggauguggug

SEQ ID NO: 3615 - RNA, 20 nt, Artificial sequence
  specific aptamers
ggcaguggugaggagaggag

SEQ ID NO: 3616 - RNA, 20 nt, Artificial sequence
  specific aptamers
ggcaguggugaggagaggcg

SEQ ID NO: 3617 - RNA, 20 nt, Artificial sequence
  specific aptamers
ggcaguggugaggagaggug

SEQ ID NO: 3618 - RNA, 20 nt, Artificial sequence
  specific aptamers
ggcaguggugaggagcggag

SEQ ID NO: 3619 - RNA, 20 nt, Artificial sequence
  specific aptamers
ggcaguggugaggagcggcg

SEQ ID NO: 3620 - RNA, 20 nt, Artificial sequence
  specific aptamers
ggcaguggugaggagcggug

SEQ ID NO: 3621 - RNA, 20 nt, Artificial sequence
  specific aptamers
ggcaguggugaggaguggag

SEQ ID NO: 3622 - RNA, 20 nt, Artificial sequence
  specific aptamers
ggcaguggugaggaguggcg

SEQ ID NO: 3623 - RNA, 20 nt, Artificial sequence
  specific aptamers
ggcaguggugaggaguggug

SEQ ID NO: 3624 - RNA, 21 nt, Artificial sequence
  specific aptamers
ggcaguggugagguagaggag

SEQ ID NO: 3625 - RNA, 21 nt, Artificial sequence
  specific aptamers
ggcaguggugagguagaggcg

SEQ ID NO: 3626 - RNA, 21 nt, Artificial sequence
  specific aptamers
ggcaguggugagguagaggug

SEQ ID NO: 3627 - RNA, 21 nt, Artificial sequence
  specific aptamers
ggcaguggugagguagcggag

SEQ ID NO: 3628 - RNA, 21 nt, Artificial sequence
  specific aptamers
ggcaguggugagguagcggcg

SEQ ID NO: 3629 - RNA, 21 nt, Artificial sequence
  specific aptamers
ggcaguggugagguagcggug

SEQ ID NO: 3630 - RNA, 21 nt, Artificial sequence
  specific aptamers
ggcaguggugagguaguggag

SEQ ID NO: 3631 - RNA, 21 nt, Artificial sequence
  specific aptamers
ggcaguggugagguaguggcg

SEQ ID NO: 3632 - RNA, 21 nt, Artificial sequence
  specific aptamers
ggcaguggugagguaguggug

SEQ ID NO: 3633 - RNA, 21 nt, Artificial sequence
  specific aptamers
ggcaguggugagguugaggag

SEQ ID NO: 3634 - RNA, 21 nt, Artificial sequence
  specific aptamers
ggcaguggugagguugaggcg

SEQ ID NO: 3635 - RNA, 21 nt, Artificial sequence
  specific aptamers
ggcaguggugagguugaggug

SEQ ID NO: 3636 - RNA, 21 nt, Artificial sequence
  specific aptamers
ggcaguggugagguugcggag

SEQ ID NO: 3637 - RNA, 21 nt, Artificial sequence
  specific aptamers
ggcaguggugagguugcggcg

SEQ ID NO: 3638 - RNA, 21 nt, Artificial sequence
  specific aptamers
ggcaguggugagguugcggug

SEQ ID NO: 3639 - RNA, 21 nt, Artificial sequence
  specific aptamers
ggcaguggugagguuguggag

SEQ ID NO: 3640 - RNA, 21 nt, Artificial sequence
  specific aptamers
ggcaguggugagguuguggcg

SEQ ID NO: 3641 - RNA, 21 nt, Artificial sequence
  specific aptamers
ggcaguggugagguuguggug

SEQ ID NO: 3642 - RNA, 20 nt, Artificial sequence
  specific aptamers
ggcaguggugaggugaggag

SEQ ID NO: 3643 - RNA, 20 nt, Artificial sequence
  specific aptamers
ggcaguggugaggugaggcg

SEQ ID NO: 3644 - RNA, 20 nt, Artificial sequence
  specific aptamers
ggcaguggugaggugaggug

SEQ ID NO: 3645 - RNA, 20 nt, Artificial sequence
  specific aptamers
ggcaguggugaggugcggag

SEQ ID NO: 3646 - RNA, 20 nt, Artificial sequence
  specific aptamers
ggcaguggugaggugcggcg

SEQ ID NO: 3647 - RNA, 20 nt, Artificial sequence
  specific aptamers
ggcaguggugaggugcggug

SEQ ID NO: 3648 - RNA, 20 nt, Artificial sequence
  specific aptamers
ggcaguggugagguguggag

SEQ ID NO: 3649 - RNA, 20 nt, Artificial sequence
  specific aptamers
ggcaguggugagguguggcg

SEQ ID NO: 3650 - RNA, 20 nt, Artificial sequence
  specific aptamers
ggcaguggugagguguggug

SEQ ID NO: 3651 - RNA, 21 nt, Artificial sequence
  specific aptamers
ggcagugguguggaagaggag

SEQ ID NO: 3652 - RNA, 21 nt, Artificial sequence
  specific aptamers
ggcagugguguggaagaggcg

SEQ ID NO: 3653 - RNA, 21 nt, Artificial sequence
  specific aptamers
ggcagugguguggaagaggug

SEQ ID NO: 3654 - RNA, 21 nt, Artificial sequence
  specific aptamers
ggcagugguguggaagcggag

SEQ ID NO: 3655 - RNA, 21 nt, Artificial sequence
  specific aptamers
ggcagugguguggaagcggcg

SEQ ID NO: 3656 - RNA, 21 nt, Artificial sequence
  specific aptamers
ggcagugguguggaagcggug

SEQ ID NO: 3657 - RNA, 21 nt, Artificial sequence
  specific aptamers
ggcagugguguggaaguggag

SEQ ID NO: 3658 - RNA, 21 nt, Artificial sequence
  specific aptamers
ggcagugguguggaaguggcg

SEQ ID NO: 3659 - RNA, 21 nt, Artificial sequence
  specific aptamers
ggcagugguguggaaguggug

SEQ ID NO: 3660 - RNA, 21 nt, Artificial sequence
  specific aptamers
ggcagugguguggaugaggag

SEQ ID NO: 3661 - RNA, 21 nt, Artificial sequence
  specific aptamers
ggcagugguguggaugaggcg

SEQ ID NO: 3662 - RNA, 21 nt, Artificial sequence
  specific aptamers
ggcagugguguggaugaggug

SEQ ID NO: 3663 - RNA, 21 nt, Artificial sequence
  specific aptamers
ggcagugguguggaugcggag

SEQ ID NO: 3664 - RNA, 21 nt, Artificial sequence
  specific aptamers
ggcagugguguggaugcggcg

SEQ ID NO: 3665 - RNA, 21 nt, Artificial sequence
  specific aptamers
ggcagugguguggaugcggug

SEQ ID NO: 3666 - RNA, 21 nt, Artificial sequence
  specific aptamers
ggcagugguguggauguggag

SEQ ID NO: 3667 - RNA, 21 nt, Artificial sequence
  specific aptamers
ggcagugguguggauguggcg

SEQ ID NO: 3668 - RNA, 21 nt, Artificial sequence
  specific aptamers
ggcagugguguggauguggug

SEQ ID NO: 3669 - RNA, 20 nt, Artificial sequence
  specific aptamers
ggcagugguguggagaggag

SEQ ID NO: 3670 - RNA, 20 nt, Artificial sequence
  specific aptamers
ggcagugguguggagaggcg

SEQ ID NO: 3671 - RNA, 20 nt, Artificial sequence
  specific aptamers
ggcagugguguggagaggug

SEQ ID NO: 3672 - RNA, 20 nt, Artificial sequence
  specific aptamers
ggcagugguguggagcggag

SEQ ID NO: 3673 - RNA, 20 nt, Artificial sequence
  specific aptamers
ggcagugguguggagcggcg

SEQ ID NO: 3674 - RNA, 20 nt, Artificial sequence
  specific aptamers
ggcagugguguggagcggug

SEQ ID NO: 3675 - RNA, 20 nt, Artificial sequence
  specific aptamers
ggcagugguguggaguggag

SEQ ID NO: 3676 - RNA, 20 nt, Artificial sequence
  specific aptamers
ggcagugguguggaguggcg

SEQ ID NO: 3677 - RNA, 20 nt, Artificial sequence
  specific aptamers
ggcagugguguggaguggug

SEQ ID NO: 3678 - RNA, 21 nt, Artificial sequence
  specific aptamers
ggcaguggugugguagaggag

SEQ ID NO: 3679 - RNA, 21 nt, Artificial sequence
  specific aptamers
ggcaguggugugguagaggcg

SEQ ID NO: 3680 - RNA, 21 nt, Artificial sequence
  specific aptamers
ggcaguggugugguagaggug

SEQ ID NO: 3681 - RNA, 21 nt, Artificial sequence
  specific aptamers
ggcaguggugugguagcggag

SEQ ID NO: 3682 - RNA, 21 nt, Artificial sequence
  specific aptamers
ggcaguggugugguagcggcg

SEQ ID NO: 3683 - RNA, 21 nt, Artificial sequence
  specific aptamers
ggcaguggugugguagcggug

SEQ ID NO: 3684 - RNA, 21 nt, Artificial sequence
  specific aptamers
ggcaguggugugguaguggag

SEQ ID NO: 3685 - RNA, 21 nt, Artificial sequence
  specific aptamers
ggcaguggugugguaguggcg

SEQ ID NO: 3686 - RNA, 21 nt, Artificial sequence
  specific aptamers
ggcaguggugugguaguggug

SEQ ID NO: 3687 - RNA, 21 nt, Artificial sequence
  specific aptamers
ggcaguggugugguugaggag

SEQ ID NO: 3688 - RNA, 21 nt, Artificial sequence
  specific aptamers
ggcaguggugugguugaggcg

SEQ ID NO: 3689 - RNA, 21 nt, Artificial sequence
  specific aptamers
ggcaguggugugguugaggug

SEQ ID NO: 3690 - RNA, 21 nt, Artificial sequence
  specific aptamers
ggcaguggugugguugcggag

SEQ ID NO: 3691 - RNA, 21 nt, Artificial sequence
  specific aptamers
ggcaguggugugguugcggcg

SEQ ID NO: 3692 - RNA, 21 nt, Artificial sequence
  specific aptamers
ggcaguggugugguugcggug

SEQ ID NO: 3693 - RNA, 21 nt, Artificial sequence
  specific aptamers
ggcaguggugugguuguggag

SEQ ID NO: 3694 - RNA, 21 nt, Artificial sequence
  specific aptamers
ggcaguggugugguuguggcg

SEQ ID NO: 3695 - RNA, 21 nt, Artificial sequence
  specific aptamers
ggcaguggugugguuguggug

SEQ ID NO: 3696 - RNA, 20 nt, Artificial sequence
  specific aptamers
ggcagugguguggugaggag

SEQ ID NO: 3697 - RNA, 20 nt, Artificial sequence
  specific aptamers
ggcagugguguggugaggcg

SEQ ID NO: 3698 - RNA, 20 nt, Artificial sequence
  specific aptamers
ggcagugguguggugaggug

SEQ ID NO: 3699 - RNA, 20 nt, Artificial sequence
  specific aptamers
ggcagugguguggugcggag

SEQ ID NO: 3700 - RNA, 20 nt, Artificial sequence
  specific aptamers
ggcagugguguggugcggcg

SEQ ID NO: 3701 - RNA, 20 nt, Artificial sequence
  specific aptamers
ggcagugguguggugcggug

SEQ ID NO: 3702 - RNA, 20 nt, Artificial sequence
  specific aptamers
ggcaguggugugguguggag

SEQ ID NO: 3703 - RNA, 20 nt, Artificial sequence
  specific aptamers
ggcaguggugugguguggcg

SEQ ID NO: 3704 - RNA, 20 nt, Artificial sequence
  specific aptamers
ggcaguggugugguguggug

SEQ ID NO: 3705 - RNA, 21 nt, Artificial sequence
  specific aptamers
ggcugaggagaggaagaggag

SEQ ID NO: 3706 - RNA, 21 nt, Artificial sequence
  specific aptamers
ggcugaggagaggaagaggcg

SEQ ID NO: 3707 - RNA, 21 nt, Artificial sequence
  specific aptamers
ggcugaggagaggaagaggug

SEQ ID NO: 3708 - RNA, 21 nt, Artificial sequence
  specific aptamers
ggcugaggagaggaagcggag

SEQ ID NO: 3709 - RNA, 21 nt, Artificial sequence
  specific aptamers
ggcugaggagaggaagcggcg

SEQ ID NO: 3710 - RNA, 21 nt, Artificial sequence
  specific aptamers
ggcugaggagaggaagcggug

SEQ ID NO: 3711 - RNA, 21 nt, Artificial sequence
  specific aptamers
ggcugaggagaggaaguggag

SEQ ID NO: 3712 - RNA, 21 nt, Artificial sequence
  specific aptamers
ggcugaggagaggaaguggcg

SEQ ID NO: 3713 - RNA, 21 nt, Artificial sequence
  specific aptamers
ggcugaggagaggaaguggug

SEQ ID NO: 3714 - RNA, 21 nt, Artificial sequence
  specific aptamers
ggcugaggagaggaugaggag

SEQ ID NO: 3715 - RNA, 21 nt, Artificial sequence
  specific aptamers
ggcugaggagaggaugaggcg

SEQ ID NO: 3716 - RNA, 21 nt, Artificial sequence
  specific aptamers
ggcugaggagaggaugaggug

SEQ ID NO: 3717 - RNA, 21 nt, Artificial sequence
  specific aptamers
ggcugaggagaggaugcggag

SEQ ID NO: 3718 - RNA, 21 nt, Artificial sequence
  specific aptamers
ggcugaggagaggaugcggcg

SEQ ID NO: 3719 - RNA, 21 nt, Artificial sequence
  specific aptamers
ggcugaggagaggaugcggug

SEQ ID NO: 3720 - RNA, 21 nt, Artificial sequence
  specific aptamers
ggcugaggagaggauguggag

SEQ ID NO: 3721 - RNA, 21 nt, Artificial sequence
  specific aptamers
ggcugaggagaggauguggcg

SEQ ID NO: 3722 - RNA, 21 nt, Artificial sequence
  specific aptamers
ggcugaggagaggauguggug

SEQ ID NO: 3723 - RNA, 20 nt, Artificial sequence
  specific aptamers
ggcugaggagaggagaggag

SEQ ID NO: 3724 - RNA, 20 nt, Artificial sequence
  specific aptamers
ggcugaggagaggagaggcg

SEQ ID NO: 3725 - RNA, 20 nt, Artificial sequence
  specific aptamers
ggcugaggagaggagaggug

SEQ ID NO: 3726 - RNA, 20 nt, Artificial sequence
  specific aptamers
ggcugaggagaggagcggag

SEQ ID NO: 3727 - RNA, 20 nt, Artificial sequence
  specific aptamers
ggcugaggagaggagcggcg

SEQ ID NO: 3728 - RNA, 20 nt, Artificial sequence
  specific aptamers
ggcugaggagaggagcggug

SEQ ID NO: 3729 - RNA, 20 nt, Artificial sequence
  specific aptamers
ggcugaggagaggaguggag

SEQ ID NO: 3730 - RNA, 20 nt, Artificial sequence
  specific aptamers
ggcugaggagaggaguggcg

SEQ ID NO: 3731 - RNA, 20 nt, Artificial sequence
  specific aptamers
ggcugaggagaggaguggug

SEQ ID NO: 3732 - RNA, 21 nt, Artificial sequence
  specific aptamers
ggcugaggagagguagaggag

SEQ ID NO: 3733 - RNA, 21 nt, Artificial sequence
  specific aptamers
ggcugaggagagguagaggcg

SEQ ID NO: 3734 - RNA, 21 nt, Artificial sequence
  specific aptamers
ggcugaggagagguagaggug

SEQ ID NO: 3735 - RNA, 21 nt, Artificial sequence
  specific aptamers
ggcugaggagagguagcggag

SEQ ID NO: 3736 - RNA, 21 nt, Artificial sequence
  specific aptamers
ggcugaggagagguagcggcg

SEQ ID NO: 3737 - RNA, 21 nt, Artificial sequence
  specific aptamers
ggcugaggagagguagcggug

SEQ ID NO: 3738 - RNA, 21 nt, Artificial sequence
  specific aptamers
ggcugaggagagguaguggag

SEQ ID NO: 3739 - RNA, 21 nt, Artificial sequence
  specific aptamers
ggcugaggagagguaguggcg

SEQ ID NO: 3740 - RNA, 21 nt, Artificial sequence
  specific aptamers
ggcugaggagagguaguggug

SEQ ID NO: 3741 - RNA, 21 nt, Artificial sequence
  specific aptamers
ggcugaggagagguugaggag

SEQ ID NO: 3742 - RNA, 21 nt, Artificial sequence
  specific aptamers
ggcugaggagagguugaggcg

SEQ ID NO: 3743 - RNA, 21 nt, Artificial sequence
  specific aptamers
ggcugaggagagguugaggug

SEQ ID NO: 3744 - RNA, 21 nt, Artificial sequence
  specific aptamers
ggcugaggagagguugcggag

SEQ ID NO: 3745 - RNA, 21 nt, Artificial sequence
  specific aptamers
ggcugaggagagguugcggcg

SEQ ID NO: 3746 - RNA, 21 nt, Artificial sequence
  specific aptamers
ggcugaggagagguugcggug

SEQ ID NO: 3747 - RNA, 21 nt, Artificial sequence
  specific aptamers
ggcugaggagagguuguggag

SEQ ID NO: 3748 - RNA, 21 nt, Artificial sequence
  specific aptamers
ggcugaggagagguuguggcg

SEQ ID NO: 3749 - RNA, 21 nt, Artificial sequence
  specific aptamers
ggcugaggagagguuguggug

SEQ ID NO: 3750 - RNA, 20 nt, Artificial sequence
  specific aptamers
ggcugaggagaggugaggag

SEQ ID NO: 3751 - RNA, 20 nt, Artificial sequence
  specific aptamers
ggcugaggagaggugaggcg

SEQ ID NO: 3752 - RNA, 20 nt, Artificial sequence
  specific aptamers
ggcugaggagaggugaggug

SEQ ID NO: 3753 - RNA, 20 nt, Artificial sequence
  specific aptamers
ggcugaggagaggugcggag

SEQ ID NO: 3754 - RNA, 20 nt, Artificial sequence
  specific aptamers
ggcugaggagaggugcggcg

SEQ ID NO: 3755 - RNA, 20 nt, Artificial sequence
  specific aptamers
ggcugaggagaggugcggug

SEQ ID NO: 3756 - RNA, 20 nt, Artificial sequence
  specific aptamers
ggcugaggagagguguggag

SEQ ID NO: 3757 - RNA, 20 nt, Artificial sequence
  specific aptamers
ggcugaggagagguguggcg

SEQ ID NO: 3758 - RNA, 20 nt, Artificial sequence
  specific aptamers
ggcugaggagagguguggug

SEQ ID NO: 3759 - RNA, 21 nt, Artificial sequence
  specific aptamers
ggcugaggaguggaagaggag

SEQ ID NO: 3760 - RNA, 21 nt, Artificial sequence
  specific aptamers
ggcugaggaguggaagaggcg

SEQ ID NO: 3761 - RNA, 21 nt, Artificial sequence
  specific aptamers
ggcugaggaguggaagaggug

SEQ ID NO: 3762 - RNA, 21 nt, Artificial sequence
  specific aptamers
ggcugaggaguggaagcggag

SEQ ID NO: 3763 - RNA, 21 nt, Artificial sequence
  specific aptamers
ggcugaggaguggaagcggcg

SEQ ID NO: 3764 - RNA, 21 nt, Artificial sequence
  specific aptamers
ggcugaggaguggaagcggug

SEQ ID NO: 3765 - RNA, 21 nt, Artificial sequence
  specific aptamers
ggcugaggaguggaaguggag

SEQ ID NO: 3766 - RNA, 21 nt, Artificial sequence
  specific aptamers
ggcugaggaguggaaguggcg

SEQ ID NO: 3767 - RNA, 21 nt, Artificial sequence
  specific aptamers
ggcugaggaguggaaguggug

SEQ ID NO: 3768 - RNA, 21 nt, Artificial sequence
  specific aptamers
ggcugaggaguggaugaggag

SEQ ID NO: 3769 - RNA, 21 nt, Artificial sequence
  specific aptamers
ggcugaggaguggaugaggcg

SEQ ID NO: 3770 - RNA, 21 nt, Artificial sequence
  specific aptamers
ggcugaggaguggaugaggug

SEQ ID NO: 3771 - RNA, 21 nt, Artificial sequence
  specific aptamers
ggcugaggaguggaugcggag

SEQ ID NO: 3772 - RNA, 21 nt, Artificial sequence
  specific aptamers
ggcugaggaguggaugcggcg

SEQ ID NO: 3773 - RNA, 21 nt, Artificial sequence
  specific aptamers
ggcugaggaguggaugcggug

SEQ ID NO: 3774 - RNA, 21 nt, Artificial sequence
  specific aptamers
ggcugaggaguggauguggag

SEQ ID NO: 3775 - RNA, 21 nt, Artificial sequence
  specific aptamers
ggcugaggaguggauguggcg

SEQ ID NO: 3776 - RNA, 21 nt, Artificial sequence
  specific aptamers
ggcugaggaguggauguggug

SEQ ID NO: 3777 - RNA, 20 nt, Artificial sequence
  specific aptamers
ggcugaggaguggagaggag

SEQ ID NO: 3778 - RNA, 20 nt, Artificial sequence
  specific aptamers
ggcugaggaguggagaggcg

SEQ ID NO: 3779 - RNA, 20 nt, Artificial sequence
  specific aptamers
ggcugaggaguggagaggug

SEQ ID NO: 3780 - RNA, 20 nt, Artificial sequence
  specific aptamers
ggcugaggaguggagcggag

SEQ ID NO: 3781 - RNA, 20 nt, Artificial sequence
  specific aptamers
ggcugaggaguggagcggcg

SEQ ID NO: 3782 - RNA, 20 nt, Artificial sequence
  specific aptamers
ggcugaggaguggagcggug

SEQ ID NO: 3783 - RNA, 20 nt, Artificial sequence
  specific aptamers
ggcugaggaguggaguggag

SEQ ID NO: 3784 - RNA, 20 nt, Artificial sequence
  specific aptamers
ggcugaggaguggaguggcg

SEQ ID NO: 3785 - RNA, 20 nt, Artificial sequence
  specific aptamers
ggcugaggaguggaguggug

SEQ ID NO: 3786 - RNA, 21 nt, Artificial sequence
  specific aptamers
ggcugaggagugguagaggag

SEQ ID NO: 3787 - RNA, 21 nt, Artificial sequence
  specific aptamers
ggcugaggagugguagaggcg

SEQ ID NO: 3788 - RNA, 21 nt, Artificial sequence
  specific aptamers
ggcugaggagugguagaggug

SEQ ID NO: 3789 - RNA, 21 nt, Artificial sequence
  specific aptamers
ggcugaggagugguagcggag

SEQ ID NO: 3790 - RNA, 21 nt, Artificial sequence
  specific aptamers
ggcugaggagugguagcggcg

SEQ ID NO: 3791 - RNA, 21 nt, Artificial sequence
  specific aptamers
ggcugaggagugguagcggug

SEQ ID NO: 3792 - RNA, 21 nt, Artificial sequence
  specific aptamers
ggcugaggagugguaguggag

SEQ ID NO: 3793 - RNA, 21 nt, Artificial sequence
  specific aptamers
ggcugaggagugguaguggcg

SEQ ID NO: 3794 - RNA, 21 nt, Artificial sequence
  specific aptamers
ggcugaggagugguaguggug

SEQ ID NO: 3795 - RNA, 21 nt, Artificial sequence
  specific aptamers
ggcugaggagugguugaggag

SEQ ID NO: 3796 - RNA, 21 nt, Artificial sequence
  specific aptamers
ggcugaggagugguugaggcg

SEQ ID NO: 3797 - RNA, 21 nt, Artificial sequence
  specific aptamers
ggcugaggagugguugaggug

SEQ ID NO: 3798 - RNA, 21 nt, Artificial sequence
  specific aptamers
ggcugaggagugguugcggag

SEQ ID NO: 3799 - RNA, 21 nt, Artificial sequence
  specific aptamers
ggcugaggagugguugcggcg

SEQ ID NO: 3800 - RNA, 21 nt, Artificial sequence
  specific aptamers
ggcugaggagugguugcggug

SEQ ID NO: 3801 - RNA, 21 nt, Artificial sequence
  specific aptamers
ggcugaggagugguuguggag

SEQ ID NO: 3802 - RNA, 21 nt, Artificial sequence
  specific aptamers
ggcugaggagugguuguggcg

SEQ ID NO: 3803 - RNA, 21 nt, Artificial sequence
  specific aptamers
ggcugaggagugguuguggug

SEQ ID NO: 3804 - RNA, 20 nt, Artificial sequence
  specific aptamers
ggcugaggaguggugaggag

SEQ ID NO: 3805 - RNA, 20 nt, Artificial sequence
  specific aptamers
ggcugaggaguggugaggcg

SEQ ID NO: 3806 - RNA, 20 nt, Artificial sequence
  specific aptamers
ggcugaggaguggugaggug

SEQ ID NO: 3807 - RNA, 20 nt, Artificial sequence
  specific aptamers
ggcugaggaguggugcggag

SEQ ID NO: 3808 - RNA, 20 nt, Artificial sequence
  specific aptamers
ggcugaggaguggugcggcg

SEQ ID NO: 3809 - RNA, 20 nt, Artificial sequence
  specific aptamers
ggcugaggaguggugcggug

SEQ ID NO: 3810 - RNA, 20 nt, Artificial sequence
  specific aptamers
ggcugaggagugguguggag

SEQ ID NO: 3811 - RNA, 20 nt, Artificial sequence
  specific aptamers
ggcugaggagugguguggcg

SEQ ID NO: 3812 - RNA, 20 nt, Artificial sequence
  specific aptamers
ggcugaggagugguguggug

SEQ ID NO: 3813 - RNA, 21 nt, Artificial sequence
  specific aptamers
ggcugaggugaggaagaggag

SEQ ID NO: 3814 - RNA, 21 nt, Artificial sequence
  specific aptamers
ggcugaggugaggaagaggcg

SEQ ID NO: 3815 - RNA, 21 nt, Artificial sequence
  specific aptamers
ggcugaggugaggaagaggug

SEQ ID NO: 3816 - RNA, 21 nt, Artificial sequence
  specific aptamers
ggcugaggugaggaagcggag

SEQ ID NO: 3817 - RNA, 21 nt, Artificial sequence
  specific aptamers
ggcugaggugaggaagcggcg

SEQ ID NO: 3818 - RNA, 21 nt, Artificial sequence
  specific aptamers
ggcugaggugaggaagcggug

SEQ ID NO: 3819 - RNA, 21 nt, Artificial sequence
  specific aptamers
ggcugaggugaggaaguggag

SEQ ID NO: 3820 - RNA, 21 nt, Artificial sequence
  specific aptamers
ggcugaggugaggaaguggcg

SEQ ID NO: 3821 - RNA, 21 nt, Artificial sequence
  specific aptamers
ggcugaggugaggaaguggug

SEQ ID NO: 3822 - RNA, 21 nt, Artificial sequence
  specific aptamers
ggcugaggugaggaugaggag

SEQ ID NO: 3823 - RNA, 21 nt, Artificial sequence
  specific aptamers
ggcugaggugaggaugaggcg

SEQ ID NO: 3824 - RNA, 21 nt, Artificial sequence
  specific aptamers
ggcugaggugaggaugaggug

SEQ ID NO: 3825 - RNA, 21 nt, Artificial sequence
  specific aptamers
ggcugaggugaggaugcggag

SEQ ID NO: 3826 - RNA, 21 nt, Artificial sequence
  specific aptamers
ggcugaggugaggaugcggcg

SEQ ID NO: 3827 - RNA, 21 nt, Artificial sequence
  specific aptamers
ggcugaggugaggaugcggug

SEQ ID NO: 3828 - RNA, 21 nt, Artificial sequence
  specific aptamers
ggcugaggugaggauguggag

SEQ ID NO: 3829 - RNA, 21 nt, Artificial sequence
  specific aptamers
ggcugaggugaggauguggcg

SEQ ID NO: 3830 - RNA, 21 nt, Artificial sequence
  specific aptamers
ggcugaggugaggauguggug

SEQ ID NO: 3831 - RNA, 20 nt, Artificial sequence
  specific aptamers
ggcugaggugaggagaggag

SEQ ID NO: 3832 - RNA, 20 nt, Artificial sequence
  specific aptamers
ggcugaggugaggagaggcg

SEQ ID NO: 3833 - RNA, 20 nt, Artificial sequence
  specific aptamers
ggcugaggugaggagaggug

SEQ ID NO: 3834 - RNA, 20 nt, Artificial sequence
  specific aptamers
ggcugaggugaggagcggag

SEQ ID NO: 3835 - RNA, 20 nt, Artificial sequence
  specific aptamers
ggcugaggugaggagcggcg

SEQ ID NO: 3836 - RNA, 20 nt, Artificial sequence
  specific aptamers
ggcugaggugaggagcggug

SEQ ID NO: 3837 - RNA, 20 nt, Artificial sequence
  specific aptamers
ggcugaggugaggaguggag

SEQ ID NO: 3838 - RNA, 20 nt, Artificial sequence
  specific aptamers
ggcugaggugaggaguggcg

SEQ ID NO: 3839 - RNA, 20 nt, Artificial sequence
  specific aptamers
ggcugaggugaggaguggug

SEQ ID NO: 3840 - RNA, 21 nt, Artificial sequence
  specific aptamers
ggcugaggugagguagaggag

SEQ ID NO: 3841 - RNA, 21 nt, Artificial sequence
  specific aptamers
ggcugaggugagguagaggcg

SEQ ID NO: 3842 - RNA, 21 nt, Artificial sequence
  specific aptamers
ggcugaggugagguagaggug

SEQ ID NO: 3843 - RNA, 21 nt, Artificial sequence
  specific aptamers
ggcugaggugagguagcggag

SEQ ID NO: 3844 - RNA, 21 nt, Artificial sequence
  specific aptamers
ggcugaggugagguagcggcg

SEQ ID NO: 3845 - RNA, 21 nt, Artificial sequence
  specific aptamers
ggcugaggugagguagcggug

SEQ ID NO: 3846 - RNA, 21 nt, Artificial sequence
  specific aptamers
ggcugaggugagguaguggag

SEQ ID NO: 3847 - RNA, 21 nt, Artificial sequence
  specific aptamers
ggcugaggugagguaguggcg

SEQ ID NO: 3848 - RNA, 21 nt, Artificial sequence
  specific aptamers
ggcugaggugagguaguggug

SEQ ID NO: 3849 - RNA, 21 nt, Artificial sequence
  specific aptamers
ggcugaggugagguugaggag

SEQ ID NO: 3850 - RNA, 21 nt, Artificial sequence
  specific aptamers
ggcugaggugagguugaggcg

SEQ ID NO: 3851 - RNA, 21 nt, Artificial sequence
  specific aptamers
ggcugaggugagguugaggug

SEQ ID NO: 3852 - RNA, 21 nt, Artificial sequence
  specific aptamers
ggcugaggugagguugcggag

SEQ ID NO: 3853 - RNA, 21 nt, Artificial sequence
  specific aptamers
ggcugaggugagguugcggcg

SEQ ID NO: 3854 - RNA, 21 nt, Artificial sequence
  specific aptamers
ggcugaggugagguugcggug

SEQ ID NO: 3855 - RNA, 21 nt, Artificial sequence
  specific aptamers
ggcugaggugagguuguggag

SEQ ID NO: 3856 - RNA, 21 nt, Artificial sequence
  specific aptamers
ggcugaggugagguuguggcg

SEQ ID NO: 3857 - RNA, 21 nt, Artificial sequence
  specific aptamers
ggcugaggugagguuguggug

SEQ ID NO: 3858 - RNA, 20 nt, Artificial sequence
  specific aptamers
ggcugaggugaggugaggag

SEQ ID NO: 3859 - RNA, 20 nt, Artificial sequence
  specific aptamers
ggcugaggugaggugaggcg

SEQ ID NO: 3860 - RNA, 20 nt, Artificial sequence
  specific aptamers
ggcugaggugaggugaggug

SEQ ID NO: 3861 - RNA, 20 nt, Artificial sequence
  specific aptamers
ggcugaggugaggugcggag

SEQ ID NO: 3862 - RNA, 20 nt, Artificial sequence
  specific aptamers
ggcugaggugaggugcggcg

SEQ ID NO: 3863 - RNA, 20 nt, Artificial sequence
  specific aptamers
ggcugaggugaggugcggug

SEQ ID NO: 3864 - RNA, 20 nt, Artificial sequence
  specific aptamers
ggcugaggugagguguggag

SEQ ID NO: 3865 - RNA, 20 nt, Artificial sequence
  specific aptamers
ggcugaggugagguguggcg

SEQ ID NO: 3866 - RNA, 20 nt, Artificial sequence
  specific aptamers
ggcugaggugagguguggug

SEQ ID NO: 3867 - RNA, 21 nt, Artificial sequence
  specific aptamers
ggcugagguguggaagaggag

SEQ ID NO: 3868 - RNA, 21 nt, Artificial sequence
  specific aptamers
ggcugagguguggaagaggcg

SEQ ID NO: 3869 - RNA, 21 nt, Artificial sequence
  specific aptamers
ggcugagguguggaagaggug

SEQ ID NO: 3870 - RNA, 21 nt, Artificial sequence
  specific aptamers
ggcugagguguggaagcggag

SEQ ID NO: 3871 - RNA, 21 nt, Artificial sequence
  specific aptamers
ggcugagguguggaagcggcg

SEQ ID NO: 3872 - RNA, 21 nt, Artificial sequence
  specific aptamers
ggcugagguguggaagcggug

SEQ ID NO: 3873 - RNA, 21 nt, Artificial sequence
  specific aptamers
ggcugagguguggaaguggag

SEQ ID NO: 3874 - RNA, 21 nt, Artificial sequence
  specific aptamers
ggcugagguguggaaguggcg

SEQ ID NO: 3875 - RNA, 21 nt, Artificial sequence
  specific aptamers
ggcugagguguggaaguggug

SEQ ID NO: 3876 - RNA, 21 nt, Artificial sequence
  specific aptamers
ggcugagguguggaugaggag

SEQ ID NO: 3877 - RNA, 21 nt, Artificial sequence
  specific aptamers
ggcugagguguggaugaggcg

SEQ ID NO: 3878 - RNA, 21 nt, Artificial sequence
  specific aptamers
ggcugagguguggaugaggug

SEQ ID NO: 3879 - RNA, 21 nt, Artificial sequence
  specific aptamers
ggcugagguguggaugcggag

SEQ ID NO: 3880 - RNA, 21 nt, Artificial sequence
  specific aptamers
ggcugagguguggaugcggcg

SEQ ID NO: 3881 - RNA, 21 nt, Artificial sequence
  specific aptamers
ggcugagguguggaugcggug

SEQ ID NO: 3882 - RNA, 21 nt, Artificial sequence
  specific aptamers
ggcugagguguggauguggag

SEQ ID NO: 3883 - RNA, 21 nt, Artificial sequence
  specific aptamers
ggcugagguguggauguggcg

SEQ ID NO: 3884 - RNA, 21 nt, Artificial sequence
  specific aptamers
ggcugagguguggauguggug

SEQ ID NO: 3885 - RNA, 20 nt, Artificial sequence
  specific aptamers
ggcugagguguggagaggag

SEQ ID NO: 3886 - RNA, 20 nt, Artificial sequence
  specific aptamers
ggcugagguguggagaggcg

SEQ ID NO: 3887 - RNA, 20 nt, Artificial sequence
  specific aptamers
ggcugagguguggagaggug

SEQ ID NO: 3888 - RNA, 20 nt, Artificial sequence
  specific aptamers
ggcugagguguggagcggag

SEQ ID NO: 3889 - RNA, 20 nt, Artificial sequence
  specific aptamers
ggcugagguguggagcggcg

SEQ ID NO: 3890 - RNA, 20 nt, Artificial sequence
  specific aptamers
ggcugagguguggagcggug

SEQ ID NO: 3891 - RNA, 20 nt, Artificial sequence
  specific aptamers
ggcugagguguggaguggag

SEQ ID NO: 3892 - RNA, 20 nt, Artificial sequence
  specific aptamers
ggcugagguguggaguggcg

SEQ ID NO: 3893 - RNA, 20 nt, Artificial sequence
  specific aptamers
ggcugagguguggaguggug

SEQ ID NO: 3894 - RNA, 21 nt, Artificial sequence
  specific aptamers
ggcugaggugugguagaggag

SEQ ID NO: 3895 - RNA, 21 nt, Artificial sequence
  specific aptamers
ggcugaggugugguagaggcg

SEQ ID NO: 3896 - RNA, 21 nt, Artificial sequence
  specific aptamers
ggcugaggugugguagaggug

SEQ ID NO: 3897 - RNA, 21 nt, Artificial sequence
  specific aptamers
ggcugaggugugguagcggag

SEQ ID NO: 3898 - RNA, 21 nt, Artificial sequence
  specific aptamers
ggcugaggugugguagcggcg

SEQ ID NO: 3899 - RNA, 21 nt, Artificial sequence
  specific aptamers
ggcugaggugugguagcggug

SEQ ID NO: 3900 - RNA, 21 nt, Artificial sequence
  specific aptamers
ggcugaggugugguaguggag

SEQ ID NO: 3901 - RNA, 21 nt, Artificial sequence
  specific aptamers
ggcugaggugugguaguggcg

SEQ ID NO: 3902 - RNA, 21 nt, Artificial sequence
  specific aptamers
ggcugaggugugguaguggug

SEQ ID NO: 3903 - RNA, 21 nt, Artificial sequence
  specific aptamers
ggcugaggugugguugaggag

SEQ ID NO: 3904 - RNA, 21 nt, Artificial sequence
  specific aptamers
ggcugaggugugguugaggcg

SEQ ID NO: 3905 - RNA, 21 nt, Artificial sequence
  specific aptamers
ggcugaggugugguugaggug

SEQ ID NO: 3906 - RNA, 21 nt, Artificial sequence
  specific aptamers
ggcugaggugugguugcggag

SEQ ID NO: 3907 - RNA, 21 nt, Artificial sequence
  specific aptamers
ggcugaggugugguugcggcg

SEQ ID NO: 3908 - RNA, 21 nt, Artificial sequence
  specific aptamers
ggcugaggugugguugcggug

SEQ ID NO: 3909 - RNA, 21 nt, Artificial sequence
  specific aptamers
ggcugaggugugguuguggag

SEQ ID NO: 3910 - RNA, 21 nt, Artificial sequence
  specific aptamers
ggcugaggugugguuguggcg

SEQ ID NO: 3911 - RNA, 21 nt, Artificial sequence
  specific aptamers
ggcugaggugugguuguggug

SEQ ID NO: 3912 - RNA, 20 nt, Artificial sequence
  specific aptamers
ggcugagguguggugaggag

SEQ ID NO: 3913 - RNA, 20 nt, Artificial sequence
  specific aptamers
ggcugagguguggugaggcg

SEQ ID NO: 3914 - RNA, 20 nt, Artificial sequence
  specific aptamers
ggcugagguguggugaggug

SEQ ID NO: 3915 - RNA, 20 nt, Artificial sequence
  specific aptamers
ggcugagguguggugcggag

SEQ ID NO: 3916 - RNA, 20 nt, Artificial sequence
  specific aptamers
ggcugagguguggugcggcg

SEQ ID NO: 3917 - RNA, 20 nt, Artificial sequence
  specific aptamers
ggcugagguguggugcggug

SEQ ID NO: 3918 - RNA, 20 nt, Artificial sequence
  specific aptamers
ggcugaggugugguguggag

SEQ ID NO: 3919 - RNA, 20 nt, Artificial sequence
  specific aptamers
ggcugaggugugguguggcg

SEQ ID NO: 3920 - RNA, 20 nt, Artificial sequence
  specific aptamers
ggcugaggugugguguggug

SEQ ID NO: 3921 - RNA, 21 nt, Artificial sequence
  specific aptamers
ggcuguggagaggaagaggag

SEQ ID NO: 3922 - RNA, 21 nt, Artificial sequence
  specific aptamers
ggcuguggagaggaagaggcg

SEQ ID NO: 3923 - RNA, 21 nt, Artificial sequence
  specific aptamers
ggcuguggagaggaagaggug

SEQ ID NO: 3924 - RNA, 21 nt, Artificial sequence
  specific aptamers
ggcuguggagaggaagcggag

SEQ ID NO: 3925 - RNA, 21 nt, Artificial sequence
  specific aptamers
ggcuguggagaggaagcggcg

SEQ ID NO: 3926 - RNA, 21 nt, Artificial sequence
  specific aptamers
ggcuguggagaggaagcggug

SEQ ID NO: 3927 - RNA, 21 nt, Artificial sequence
  specific aptamers
ggcuguggagaggaaguggag

SEQ ID NO: 3928 - RNA, 21 nt, Artificial sequence
  specific aptamers
ggcuguggagaggaaguggcg

SEQ ID NO: 3929 - RNA, 21 nt, Artificial sequence
  specific aptamers
ggcuguggagaggaaguggug

SEQ ID NO: 3930 - RNA, 21 nt, Artificial sequence
  specific aptamers
ggcuguggagaggaugaggag

SEQ ID NO: 3931 - RNA, 21 nt, Artificial sequence
  specific aptamers
ggcuguggagaggaugaggcg

SEQ ID NO: 3932 - RNA, 21 nt, Artificial sequence
  specific aptamers
ggcuguggagaggaugaggug

SEQ ID NO: 3933 - RNA, 21 nt, Artificial sequence
  specific aptamers
ggcuguggagaggaugcggag

SEQ ID NO: 3934 - RNA, 21 nt, Artificial sequence
  specific aptamers
ggcuguggagaggaugcggcg

SEQ ID NO: 3935 - RNA, 21 nt, Artificial sequence
  specific aptamers
ggcuguggagaggaugcggug

SEQ ID NO: 3936 - RNA, 21 nt, Artificial sequence
  specific aptamers
ggcuguggagaggauguggag

SEQ ID NO: 3937 - RNA, 21 nt, Artificial sequence
  specific aptamers
ggcuguggagaggauguggcg

SEQ ID NO: 3938 - RNA, 21 nt, Artificial sequence
  specific aptamers
ggcuguggagaggauguggug

SEQ ID NO: 3939 - RNA, 20 nt, Artificial sequence
  specific aptamers
ggcuguggagaggagaggag

SEQ ID NO: 3940 - RNA, 20 nt, Artificial sequence
  specific aptamers
ggcuguggagaggagaggcg

SEQ ID NO: 3941 - RNA, 20 nt, Artificial sequence
  specific aptamers
ggcuguggagaggagaggug

SEQ ID NO: 3942 - RNA, 20 nt, Artificial sequence
  specific aptamers
ggcuguggagaggagcggag

SEQ ID NO: 3943 - RNA, 20 nt, Artificial sequence
  specific aptamers
ggcuguggagaggagcggcg

SEQ ID NO: 3944 - RNA, 20 nt, Artificial sequence
  specific aptamers
ggcuguggagaggagcggug

SEQ ID NO: 3945 - RNA, 20 nt, Artificial sequence
  specific aptamers
ggcuguggagaggaguggag

SEQ ID NO: 3946 - RNA, 20 nt, Artificial sequence
  specific aptamers
ggcuguggagaggaguggcg

SEQ ID NO: 3947 - RNA, 20 nt, Artificial sequence
  specific aptamers
ggcuguggagaggaguggug

SEQ ID NO: 3948 - RNA, 21 nt, Artificial sequence
  specific aptamers
ggcuguggagagguagaggag

SEQ ID NO: 3949 - RNA, 21 nt, Artificial sequence
  specific aptamers
ggcuguggagagguagaggcg

SEQ ID NO: 3950 - RNA, 21 nt, Artificial sequence
  specific aptamers
ggcuguggagagguagaggug

SEQ ID NO: 3951 - RNA, 21 nt, Artificial sequence
  specific aptamers
ggcuguggagagguagcggag

SEQ ID NO: 3952 - RNA, 21 nt, Artificial sequence
  specific aptamers
ggcuguggagagguagcggcg

SEQ ID NO: 3953 - RNA, 21 nt, Artificial sequence
  specific aptamers
ggcuguggagagguagcggug

SEQ ID NO: 3954 - RNA, 21 nt, Artificial sequence
  specific aptamers
ggcuguggagagguaguggag

SEQ ID NO: 3955 - RNA, 21 nt, Artificial sequence
  specific aptamers
ggcuguggagagguaguggcg

SEQ ID NO: 3956 - RNA, 21 nt, Artificial sequence
  specific aptamers
ggcuguggagagguaguggug

SEQ ID NO: 3957 - RNA, 21 nt, Artificial sequence
  specific aptamers
ggcuguggagagguugaggag

SEQ ID NO: 3958 - RNA, 21 nt, Artificial sequence
  specific aptamers
ggcuguggagagguugaggcg

SEQ ID NO: 3959 - RNA, 21 nt, Artificial sequence
  specific aptamers
ggcuguggagagguugaggug

SEQ ID NO: 3960 - RNA, 21 nt, Artificial sequence
  specific aptamers
ggcuguggagagguugcggag

SEQ ID NO: 3961 - RNA, 21 nt, Artificial sequence
  specific aptamers
ggcuguggagagguugcggcg

SEQ ID NO: 3962 - RNA, 21 nt, Artificial sequence
  specific aptamers
ggcuguggagagguugcggug

SEQ ID NO: 3963 - RNA, 21 nt, Artificial sequence
  specific aptamers
ggcuguggagagguuguggag

SEQ ID NO: 3964 - RNA, 21 nt, Artificial sequence
  specific aptamers
ggcuguggagagguuguggcg

SEQ ID NO: 3965 - RNA, 21 nt, Artificial sequence
  specific aptamers
ggcuguggagagguuguggug

SEQ ID NO: 3966 - RNA, 20 nt, Artificial sequence
  specific aptamers
ggcuguggagaggugaggag

SEQ ID NO: 3967 - RNA, 20 nt, Artificial sequence
  specific aptamers
ggcuguggagaggugaggcg

SEQ ID NO: 3968 - RNA, 20 nt, Artificial sequence
  specific aptamers
ggcuguggagaggugaggug

SEQ ID NO: 3969 - RNA, 20 nt, Artificial sequence
  specific aptamers
ggcuguggagaggugcggag

SEQ ID NO: 3970 - RNA, 20 nt, Artificial sequence
  specific aptamers
ggcuguggagaggugcggcg

SEQ ID NO: 3971 - RNA, 20 nt, Artificial sequence
  specific aptamers
ggcuguggagaggugcggug

SEQ ID NO: 3972 - RNA, 20 nt, Artificial sequence
  specific aptamers
ggcuguggagagguguggag

SEQ ID NO: 3973 - RNA, 20 nt, Artificial sequence
  specific aptamers
ggcuguggagagguguggcg

SEQ ID NO: 3974 - RNA, 20 nt, Artificial sequence
  specific aptamers
ggcuguggagagguguggug

SEQ ID NO: 3975 - RNA, 21 nt, Artificial sequence
  specific aptamers
ggcuguggaguggaagaggag

SEQ ID NO: 3976 - RNA, 21 nt, Artificial sequence
  specific aptamers
ggcuguggaguggaagaggcg

SEQ ID NO: 3977 - RNA, 21 nt, Artificial sequence
  specific aptamers
ggcuguggaguggaagaggug

SEQ ID NO: 3978 - RNA, 21 nt, Artificial sequence
  specific aptamers
ggcuguggaguggaagcggag

SEQ ID NO: 3979 - RNA, 21 nt, Artificial sequence
  specific aptamers
ggcuguggaguggaagcggcg

SEQ ID NO: 3980 - RNA, 21 nt, Artificial sequence
  specific aptamers
ggcuguggaguggaagcggug

SEQ ID NO: 3981 - RNA, 21 nt, Artificial sequence
  specific aptamers
ggcuguggaguggaaguggag

SEQ ID NO: 3982 - RNA, 21 nt, Artificial sequence
  specific aptamers
ggcuguggaguggaaguggcg

SEQ ID NO: 3983 - RNA, 21 nt, Artificial sequence
  specific aptamers
ggcuguggaguggaaguggug

SEQ ID NO: 3984 - RNA, 21 nt, Artificial sequence
  specific aptamers
ggcuguggaguggaugaggag

SEQ ID NO: 3985 - RNA, 21 nt, Artificial sequence
  specific aptamers
ggcuguggaguggaugaggcg

SEQ ID NO: 3986 - RNA, 21 nt, Artificial sequence
  specific aptamers
ggcuguggaguggaugaggug

SEQ ID NO: 3987 - RNA, 21 nt, Artificial sequence
  specific aptamers
ggcuguggaguggaugcggag

SEQ ID NO: 3988 - RNA, 21 nt, Artificial sequence
  specific aptamers
ggcuguggaguggaugcggcg

SEQ ID NO: 3989 - RNA, 21 nt, Artificial sequence
  specific aptamers
ggcuguggaguggaugcggug

SEQ ID NO: 3990 - RNA, 21 nt, Artificial sequence
  specific aptamers
ggcuguggaguggauguggag

SEQ ID NO: 3991 - RNA, 21 nt, Artificial sequence
  specific aptamers
ggcuguggaguggauguggcg

SEQ ID NO: 3992 - RNA, 21 nt, Artificial sequence
  specific aptamers
ggcuguggaguggauguggug

SEQ ID NO: 3993 - RNA, 20 nt, Artificial sequence
  specific aptamers
ggcuguggaguggagaggag

SEQ ID NO: 3994 - RNA, 20 nt, Artificial sequence
  specific aptamers
ggcuguggaguggagaggcg

SEQ ID NO: 3995 - RNA, 20 nt, Artificial sequence
  specific aptamers
ggcuguggaguggagaggug

SEQ ID NO: 3996 - RNA, 20 nt, Artificial sequence
  specific aptamers
ggcuguggaguggagcggag

SEQ ID NO: 3997 - RNA, 20 nt, Artificial sequence
  specific aptamers
ggcuguggaguggagcggcg

SEQ ID NO: 3998 - RNA, 20 nt, Artificial sequence
  specific aptamers
ggcuguggaguggagcggug

SEQ ID NO: 3999 - RNA, 20 nt, Artificial sequence
  specific aptamers
ggcuguggaguggaguggag

SEQ ID NO: 4000 - RNA, 20 nt, Artificial sequence
  specific aptamers
ggcuguggaguggaguggcg

SEQ ID NO: 4001 - RNA, 20 nt, Artificial sequence
  specific aptamers
ggcuguggaguggaguggug

SEQ ID NO: 4002 - RNA, 21 nt, Artificial sequence
  specific aptamers
ggcuguggagugguagaggag

SEQ ID NO: 4003 - RNA, 21 nt, Artificial sequence
  specific aptamers
ggcuguggagugguagaggcg

SEQ ID NO: 4004 - RNA, 21 nt, Artificial sequence
  specific aptamers
ggcuguggagugguagaggug

SEQ ID NO: 4005 - RNA, 21 nt, Artificial sequence
  specific aptamers
ggcuguggagugguagcggag

SEQ ID NO: 4006 - RNA, 21 nt, Artificial sequence
  specific aptamers
ggcuguggagugguagcggcg

SEQ ID NO: 4007 - RNA, 21 nt, Artificial sequence
  specific aptamers
ggcuguggagugguagcggug

SEQ ID NO: 4008 - RNA, 21 nt, Artificial sequence
  specific aptamers
ggcuguggagugguaguggag

SEQ ID NO: 4009 - RNA, 21 nt, Artificial sequence
  specific aptamers
ggcuguggagugguaguggcg

SEQ ID NO: 4010 - RNA, 21 nt, Artificial sequence
  specific aptamers
ggcuguggagugguaguggug

SEQ ID NO: 4011 - RNA, 21 nt, Artificial sequence
  specific aptamers
ggcuguggagugguugaggag

SEQ ID NO: 4012 - RNA, 21 nt, Artificial sequence
  specific aptamers
ggcuguggagugguugaggcg

SEQ ID NO: 4013 - RNA, 21 nt, Artificial sequence
  specific aptamers
ggcuguggagugguugaggug

SEQ ID NO: 4014 - RNA, 21 nt, Artificial sequence
  specific aptamers
ggcuguggagugguugcggag

SEQ ID NO: 4015 - RNA, 21 nt, Artificial sequence
  specific aptamers
ggcuguggagugguugcggcg

SEQ ID NO: 4016 - RNA, 21 nt, Artificial sequence
  specific aptamers
ggcuguggagugguugcggug

SEQ ID NO: 4017 - RNA, 21 nt, Artificial sequence
  specific aptamers
ggcuguggagugguuguggag

SEQ ID NO: 4018 - RNA, 21 nt, Artificial sequence
  specific aptamers
ggcuguggagugguuguggcg

SEQ ID NO: 4019 - RNA, 21 nt, Artificial sequence
  specific aptamers
ggcuguggagugguuguggug

SEQ ID NO: 4020 - RNA, 20 nt, Artificial sequence
  specific aptamers
ggcuguggaguggugaggag

SEQ ID NO: 4021 - RNA, 20 nt, Artificial sequence
  specific aptamers
ggcuguggaguggugaggcg

SEQ ID NO: 4022 - RNA, 20 nt, Artificial sequence
  specific aptamers
ggcuguggaguggugaggug

SEQ ID NO: 4023 - RNA, 20 nt, Artificial sequence
  specific aptamers
ggcuguggaguggugcggag

SEQ ID NO: 4024 - RNA, 20 nt, Artificial sequence
  specific aptamers
ggcuguggaguggugcggcg

SEQ ID NO: 4025 - RNA, 20 nt, Artificial sequence
  specific aptamers
ggcuguggaguggugcggug

SEQ ID NO: 4026 - RNA, 20 nt, Artificial sequence
  specific aptamers
ggcuguggagugguguggag

SEQ ID NO: 4027 - RNA, 20 nt, Artificial sequence
  specific aptamers
ggcuguggagugguguggcg

SEQ ID NO: 4028 - RNA, 20 nt, Artificial sequence
  specific aptamers
ggcuguggagugguguggug

SEQ ID NO: 4029 - RNA, 21 nt, Artificial sequence
  specific aptamers
ggcuguggugaggaagaggag

SEQ ID NO: 4030 - RNA, 21 nt, Artificial sequence
  specific aptamers
ggcuguggugaggaagaggcg

SEQ ID NO: 4031 - RNA, 21 nt, Artificial sequence
  specific aptamers
ggcuguggugaggaagaggug

SEQ ID NO: 4032 - RNA, 21 nt, Artificial sequence
  specific aptamers
ggcuguggugaggaagcggag

SEQ ID NO: 4033 - RNA, 21 nt, Artificial sequence
  specific aptamers
ggcuguggugaggaagcggcg

SEQ ID NO: 4034 - RNA, 21 nt, Artificial sequence
  specific aptamers
ggcuguggugaggaagcggug

SEQ ID NO: 4035 - RNA, 21 nt, Artificial sequence
  specific aptamers
ggcuguggugaggaaguggag

SEQ ID NO: 4036 - RNA, 21 nt, Artificial sequence
  specific aptamers
ggcuguggugaggaaguggcg

SEQ ID NO: 4037 - RNA, 21 nt, Artificial sequence
  specific aptamers
ggcuguggugaggaaguggug

SEQ ID NO: 4038 - RNA, 21 nt, Artificial sequence
  specific aptamers
ggcuguggugaggaugaggag

SEQ ID NO: 4039 - RNA, 21 nt, Artificial sequence
  specific aptamers
ggcuguggugaggaugaggcg

SEQ ID NO: 4040 - RNA, 21 nt, Artificial sequence
  specific aptamers
ggcuguggugaggaugaggug

SEQ ID NO: 4041 - RNA, 21 nt, Artificial sequence
  specific aptamers
ggcuguggugaggaugcggag

SEQ ID NO: 4042 - RNA, 21 nt, Artificial sequence
  specific aptamers
ggcuguggugaggaugcggcg

SEQ ID NO: 4043 - RNA, 21 nt, Artificial sequence
  specific aptamers
ggcuguggugaggaugcggug

SEQ ID NO: 4044 - RNA, 21 nt, Artificial sequence
  specific aptamers
ggcuguggugaggauguggag

SEQ ID NO: 4045 - RNA, 21 nt, Artificial sequence
  specific aptamers
ggcuguggugaggauguggcg

SEQ ID NO: 4046 - RNA, 21 nt, Artificial sequence
  specific aptamers
ggcuguggugaggauguggug

SEQ ID NO: 4047 - RNA, 20 nt, Artificial sequence
  specific aptamers
ggcuguggugaggagaggag

SEQ ID NO: 4048 - RNA, 20 nt, Artificial sequence
  specific aptamers
ggcuguggugaggagaggcg

SEQ ID NO: 4049 - RNA, 20 nt, Artificial sequence
  specific aptamers
ggcuguggugaggagaggug

SEQ ID NO: 4050 - RNA, 20 nt, Artificial sequence
  specific aptamers
ggcuguggugaggagcggag

SEQ ID NO: 4051 - RNA, 20 nt, Artificial sequence
  specific aptamers
ggcuguggugaggagcggcg

SEQ ID NO: 4052 - RNA, 20 nt, Artificial sequence
  specific aptamers
ggcuguggugaggagcggug

SEQ ID NO: 4053 - RNA, 20 nt, Artificial sequence
  specific aptamers
ggcuguggugaggaguggag

SEQ ID NO: 4054 - RNA, 20 nt, Artificial sequence
  specific aptamers
ggcuguggugaggaguggcg

SEQ ID NO: 4055 - RNA, 20 nt, Artificial sequence
  specific aptamers
ggcuguggugaggaguggug

SEQ ID NO: 4056 - RNA, 21 nt, Artificial sequence
  specific aptamers
ggcuguggugagguagaggag

SEQ ID NO: 4057 - RNA, 21 nt, Artificial sequence
  specific aptamers
ggcuguggugagguagaggcg

SEQ ID NO: 4058 - RNA, 21 nt, Artificial sequence
  specific aptamers
ggcuguggugagguagaggug

SEQ ID NO: 4059 - RNA, 21 nt, Artificial sequence
  specific aptamers
ggcuguggugagguagcggag

SEQ ID NO: 4060 - RNA, 21 nt, Artificial sequence
  specific aptamers
ggcuguggugagguagcggcg

SEQ ID NO: 4061 - RNA, 21 nt, Artificial sequence
  specific aptamers
ggcuguggugagguagcggug

SEQ ID NO: 4062 - RNA, 21 nt, Artificial sequence
  specific aptamers
ggcuguggugagguaguggag

SEQ ID NO: 4063 - RNA, 21 nt, Artificial sequence
  specific aptamers
ggcuguggugagguaguggcg

SEQ ID NO: 4064 - RNA, 21 nt, Artificial sequence
  specific aptamers
ggcuguggugagguaguggug

SEQ ID NO: 4065 - RNA, 21 nt, Artificial sequence
  specific aptamers
ggcuguggugagguugaggag

SEQ ID NO: 4066 - RNA, 21 nt, Artificial sequence
  specific aptamers
ggcuguggugagguugaggcg

SEQ ID NO: 4067 - RNA, 21 nt, Artificial sequence
  specific aptamers
ggcuguggugagguugaggug

SEQ ID NO: 4068 - RNA, 21 nt, Artificial sequence
  specific aptamers
ggcuguggugagguugcggag

SEQ ID NO: 4069 - RNA, 21 nt, Artificial sequence
  specific aptamers
ggcuguggugagguugcggcg

SEQ ID NO: 4070 - RNA, 21 nt, Artificial sequence
  specific aptamers
ggcuguggugagguugcggug

SEQ ID NO: 4071 - RNA, 21 nt, Artificial sequence
  specific aptamers
ggcuguggugagguuguggag

SEQ ID NO: 4072 - RNA, 21 nt, Artificial sequence
  specific aptamers
ggcuguggugagguuguggcg

SEQ ID NO: 4073 - RNA, 21 nt, Artificial sequence
  specific aptamers
ggcuguggugagguuguggug

SEQ ID NO: 4074 - RNA, 20 nt, Artificial sequence
  specific aptamers
ggcuguggugaggugaggag

SEQ ID NO: 4075 - RNA, 20 nt, Artificial sequence
  specific aptamers
ggcuguggugaggugaggcg

SEQ ID NO: 4076 - RNA, 20 nt, Artificial sequence
  specific aptamers
ggcuguggugaggugaggug

SEQ ID NO: 4077 - RNA, 20 nt, Artificial sequence
  specific aptamers
ggcuguggugaggugcggag

SEQ ID NO: 4078 - RNA, 20 nt, Artificial sequence
  specific aptamers
ggcuguggugaggugcggcg

SEQ ID NO: 4079 - RNA, 20 nt, Artificial sequence
  specific aptamers
ggcuguggugaggugcggug

SEQ ID NO: 4080 - RNA, 20 nt, Artificial sequence
  specific aptamers
ggcuguggugagguguggag

SEQ ID NO: 4081 - RNA, 20 nt, Artificial sequence
  specific aptamers
ggcuguggugagguguggcg

SEQ ID NO: 4082 - RNA, 20 nt, Artificial sequence
  specific aptamers
ggcuguggugagguguggug

SEQ ID NO: 4083 - RNA, 21 nt, Artificial sequence
  specific aptamers
ggcugugguguggaagaggag

SEQ ID NO: 4084 - RNA, 21 nt, Artificial sequence
  specific aptamers
ggcugugguguggaagaggcg

SEQ ID NO: 4085 - RNA, 21 nt, Artificial sequence
  specific aptamers
ggcugugguguggaagaggug

SEQ ID NO: 4086 - RNA, 21 nt, Artificial sequence
  specific aptamers
ggcugugguguggaagcggag

SEQ ID NO: 4087 - RNA, 21 nt, Artificial sequence
  specific aptamers
ggcugugguguggaagcggcg

SEQ ID NO: 4088 - RNA, 21 nt, Artificial sequence
  specific aptamers
ggcugugguguggaagcggug

SEQ ID NO: 4089 - RNA, 21 nt, Artificial sequence
  specific aptamers
ggcugugguguggaaguggag

SEQ ID NO: 4090 - RNA, 21 nt, Artificial sequence
  specific aptamers
ggcugugguguggaaguggcg

SEQ ID NO: 4091 - RNA, 21 nt, Artificial sequence
  specific aptamers
ggcugugguguggaaguggug

SEQ ID NO: 4092 - RNA, 21 nt, Artificial sequence
  specific aptamers
ggcugugguguggaugaggag

SEQ ID NO: 4093 - RNA, 21 nt, Artificial sequence
  specific aptamers
ggcugugguguggaugaggcg

SEQ ID NO: 4094 - RNA, 21 nt, Artificial sequence
  specific aptamers
ggcugugguguggaugaggug

SEQ ID NO: 4095 - RNA, 21 nt, Artificial sequence
  specific aptamers
ggcugugguguggaugcggag

SEQ ID NO: 4096 - RNA, 21 nt, Artificial sequence
  specific aptamers
ggcugugguguggaugcggcg

SEQ ID NO: 4097 - RNA, 21 nt, Artificial sequence
  specific aptamers
ggcugugguguggaugcggug

SEQ ID NO: 4098 - RNA, 21 nt, Artificial sequence
  specific aptamers
ggcugugguguggauguggag

SEQ ID NO: 4099 - RNA, 21 nt, Artificial sequence
  specific aptamers
ggcugugguguggauguggcg

SEQ ID NO: 4100 - RNA, 21 nt, Artificial sequence
  specific aptamers
ggcugugguguggauguggug

SEQ ID NO: 4101 - RNA, 20 nt, Artificial sequence
  specific aptamers
ggcugugguguggagaggag

SEQ ID NO: 4102 - RNA, 20 nt, Artificial sequence
  specific aptamers
ggcugugguguggagaggcg

SEQ ID NO: 4103 - RNA, 20 nt, Artificial sequence
  specific aptamers
ggcugugguguggagaggug

SEQ ID NO: 4104 - RNA, 20 nt, Artificial sequence
  specific aptamers
ggcugugguguggagcggag

SEQ ID NO: 4105 - RNA, 20 nt, Artificial sequence
  specific aptamers
ggcugugguguggagcggcg

SEQ ID NO: 4106 - RNA, 20 nt, Artificial sequence
  specific aptamers
ggcugugguguggagcggug

SEQ ID NO: 4107 - RNA, 20 nt, Artificial sequence
  specific aptamers
ggcugugguguggaguggag

SEQ ID NO: 4108 - RNA, 20 nt, Artificial sequence
  specific aptamers
ggcugugguguggaguggcg

SEQ ID NO: 4109 - RNA, 20 nt, Artificial sequence
  specific aptamers
ggcugugguguggaguggug

SEQ ID NO: 4110 - RNA, 21 nt, Artificial sequence
  specific aptamers
ggcuguggugugguagaggag

SEQ ID NO: 4111 - RNA, 21 nt, Artificial sequence
  specific aptamers
ggcuguggugugguagaggcg

SEQ ID NO: 4112 - RNA, 21 nt, Artificial sequence
  specific aptamers
ggcuguggugugguagaggug

SEQ ID NO: 4113 - RNA, 21 nt, Artificial sequence
  specific aptamers
ggcuguggugugguagcggag

SEQ ID NO: 4114 - RNA, 21 nt, Artificial sequence
  specific aptamers
ggcuguggugugguagcggcg

SEQ ID NO: 4115 - RNA, 21 nt, Artificial sequence
  specific aptamers
ggcuguggugugguagcggug

SEQ ID NO: 4116 - RNA, 21 nt, Artificial sequence
  specific aptamers
ggcuguggugugguaguggag

SEQ ID NO: 4117 - RNA, 21 nt, Artificial sequence
  specific aptamers
ggcuguggugugguaguggcg

SEQ ID NO: 4118 - RNA, 21 nt, Artificial sequence
  specific aptamers
ggcuguggugugguaguggug

SEQ ID NO: 4119 - RNA, 21 nt, Artificial sequence
  specific aptamers
ggcuguggugugguugaggag

SEQ ID NO: 4120 - RNA, 21 nt, Artificial sequence
  specific aptamers
ggcuguggugugguugaggcg

SEQ ID NO: 4121 - RNA, 21 nt, Artificial sequence
  specific aptamers
ggcuguggugugguugaggug

SEQ ID NO: 4122 - RNA, 21 nt, Artificial sequence
  specific aptamers
ggcuguggugugguugcggag

SEQ ID NO: 4123 - RNA, 21 nt, Artificial sequence
  specific aptamers
ggcuguggugugguugcggcg

SEQ ID NO: 4124 - RNA, 21 nt, Artificial sequence
  specific aptamers
ggcuguggugugguugcggug

SEQ ID NO: 4125 - RNA, 21 nt, Artificial sequence
  specific aptamers
ggcuguggugugguuguggag

SEQ ID NO: 4126 - RNA, 21 nt, Artificial sequence
  specific aptamers
ggcuguggugugguuguggcg

SEQ ID NO: 4127 - RNA, 21 nt, Artificial sequence
  specific aptamers
ggcuguggugugguuguggug

SEQ ID NO: 4128 - RNA, 20 nt, Artificial sequence
  specific aptamers
ggcugugguguggugaggag

SEQ ID NO: 4129 - RNA, 20 nt, Artificial sequence
  specific aptamers
ggcugugguguggugaggcg

SEQ ID NO: 4130 - RNA, 20 nt, Artificial sequence
  specific aptamers
ggcugugguguggugaggug

SEQ ID NO: 4131 - RNA, 20 nt, Artificial sequence
  specific aptamers
ggcugugguguggugcggag

SEQ ID NO: 4132 - RNA, 20 nt, Artificial sequence
  specific aptamers
ggcugugguguggugcggcg

SEQ ID NO: 4133 - RNA, 20 nt, Artificial sequence
  specific aptamers
ggcugugguguggugcggug

SEQ ID NO: 4134 - RNA, 20 nt, Artificial sequence
  specific aptamers
ggcuguggugugguguggag

SEQ ID NO: 4135 - RNA, 20 nt, Artificial sequence
  specific aptamers
ggcuguggugugguguggcg

SEQ ID NO: 4136 - RNA, 20 nt, Artificial sequence
  specific aptamers
ggcuguggugugguguggug

SEQ ID NO: 4137 - RNA, 21 nt, Artificial sequence
  specific aptamers
gggagaggagaggaagaggag

SEQ ID NO: 4138 - RNA, 21 nt, Artificial sequence
  specific aptamers
gggagaggagaggaagaggcg

SEQ ID NO: 4139 - RNA, 21 nt, Artificial sequence
  specific aptamers
gggagaggagaggaagaggug

SEQ ID NO: 4140 - RNA, 21 nt, Artificial sequence
  specific aptamers
gggagaggagaggaagcggag

SEQ ID NO: 4141 - RNA, 21 nt, Artificial sequence
  specific aptamers
gggagaggagaggaagcggcg

SEQ ID NO: 4142 - RNA, 21 nt, Artificial sequence
  specific aptamers
gggagaggagaggaagcggug

SEQ ID NO: 4143 - RNA, 21 nt, Artificial sequence
  specific aptamers
gggagaggagaggaaguggag

SEQ ID NO: 4144 - RNA, 21 nt, Artificial sequence
  specific aptamers
gggagaggagaggaaguggcg

SEQ ID NO: 4145 - RNA, 21 nt, Artificial sequence
  specific aptamers
gggagaggagaggaaguggug

SEQ ID NO: 4146 - RNA, 21 nt, Artificial sequence
  specific aptamers
gggagaggagaggaugaggag

SEQ ID NO: 4147 - RNA, 21 nt, Artificial sequence
  specific aptamers
gggagaggagaggaugaggcg

SEQ ID NO: 4148 - RNA, 21 nt, Artificial sequence
  specific aptamers
gggagaggagaggaugaggug

SEQ ID NO: 4149 - RNA, 21 nt, Artificial sequence
  specific aptamers
gggagaggagaggaugcggag

SEQ ID NO: 4150 - RNA, 21 nt, Artificial sequence
  specific aptamers
gggagaggagaggaugcggcg

SEQ ID NO: 4151 - RNA, 21 nt, Artificial sequence
  specific aptamers
gggagaggagaggaugcggug

SEQ ID NO: 4152 - RNA, 21 nt, Artificial sequence
  specific aptamers
gggagaggagaggauguggag

SEQ ID NO: 4153 - RNA, 21 nt, Artificial sequence
  specific aptamers
gggagaggagaggauguggcg

SEQ ID NO: 4154 - RNA, 21 nt, Artificial sequence
  specific aptamers
gggagaggagaggauguggug

SEQ ID NO: 4155 - RNA, 20 nt, Artificial sequence
  specific aptamers
gggagaggagaggagaggag

SEQ ID NO: 4156 - RNA, 20 nt, Artificial sequence
  specific aptamers
gggagaggagaggagaggcg

SEQ ID NO: 4157 - RNA, 20 nt, Artificial sequence
  specific aptamers
gggagaggagaggagaggug

SEQ ID NO: 4158 - RNA, 20 nt, Artificial sequence
  specific aptamers
gggagaggagaggagcggag

SEQ ID NO: 4159 - RNA, 20 nt, Artificial sequence
  specific aptamers
gggagaggagaggagcggcg

SEQ ID NO: 4160 - RNA, 20 nt, Artificial sequence
  specific aptamers
gggagaggagaggagcggug

SEQ ID NO: 4161 - RNA, 20 nt, Artificial sequence
  specific aptamers
gggagaggagaggaguggag

SEQ ID NO: 4162 - RNA, 20 nt, Artificial sequence
  specific aptamers
gggagaggagaggaguggcg

SEQ ID NO: 4163 - RNA, 20 nt, Artificial sequence
  specific aptamers
gggagaggagaggaguggug

SEQ ID NO: 4164 - RNA, 21 nt, Artificial sequence
  specific aptamers
gggagaggagagguagaggag

SEQ ID NO: 4165 - RNA, 21 nt, Artificial sequence
  specific aptamers
gggagaggagagguagaggcg

SEQ ID NO: 4166 - RNA, 21 nt, Artificial sequence
  specific aptamers
gggagaggagagguagaggug

SEQ ID NO: 4167 - RNA, 21 nt, Artificial sequence
  specific aptamers
gggagaggagagguagcggag

SEQ ID NO: 4168 - RNA, 21 nt, Artificial sequence
  specific aptamers
gggagaggagagguagcggcg

SEQ ID NO: 4169 - RNA, 21 nt, Artificial sequence
  specific aptamers
gggagaggagagguagcggug

SEQ ID NO: 4170 - RNA, 21 nt, Artificial sequence
  specific aptamers
gggagaggagagguaguggag

SEQ ID NO: 4171 - RNA, 21 nt, Artificial sequence
  specific aptamers
gggagaggagagguaguggcg

SEQ ID NO: 4172 - RNA, 21 nt, Artificial sequence
  specific aptamers
gggagaggagagguaguggug

SEQ ID NO: 4173 - RNA, 21 nt, Artificial sequence
  specific aptamers
gggagaggagagguugaggag

SEQ ID NO: 4174 - RNA, 21 nt, Artificial sequence
  specific aptamers
gggagaggagagguugaggcg

SEQ ID NO: 4175 - RNA, 21 nt, Artificial sequence
  specific aptamers
gggagaggagagguugaggug

SEQ ID NO: 4176 - RNA, 21 nt, Artificial sequence
  specific aptamers
gggagaggagagguugcggag

SEQ ID NO: 4177 - RNA, 21 nt, Artificial sequence
  specific aptamers
gggagaggagagguugcggcg

SEQ ID NO: 4178 - RNA, 21 nt, Artificial sequence
  specific aptamers
gggagaggagagguugcggug

SEQ ID NO: 4179 - RNA, 21 nt, Artificial sequence
  specific aptamers
gggagaggagagguuguggag

SEQ ID NO: 4180 - RNA, 21 nt, Artificial sequence
  specific aptamers
gggagaggagagguuguggcg

SEQ ID NO: 4181 - RNA, 21 nt, Artificial sequence
  specific aptamers
gggagaggagagguuguggug

SEQ ID NO: 4182 - RNA, 20 nt, Artificial sequence
  specific aptamers
gggagaggagaggugaggag

SEQ ID NO: 4183 - RNA, 20 nt, Artificial sequence
  specific aptamers
gggagaggagaggugaggcg

SEQ ID NO: 4184 - RNA, 20 nt, Artificial sequence
  specific aptamers
gggagaggagaggugaggug

SEQ ID NO: 4185 - RNA, 20 nt, Artificial sequence
  specific aptamers
gggagaggagaggugcggag

SEQ ID NO: 4186 - RNA, 20 nt, Artificial sequence
  specific aptamers
gggagaggagaggugcggcg

SEQ ID NO: 4187 - RNA, 20 nt, Artificial sequence
  specific aptamers
gggagaggagaggugcggug

SEQ ID NO: 4188 - RNA, 20 nt, Artificial sequence
  specific aptamers
gggagaggagagguguggag

SEQ ID NO: 4189 - RNA, 20 nt, Artificial sequence
  specific aptamers
gggagaggagagguguggcg

SEQ ID NO: 4190 - RNA, 20 nt, Artificial sequence
  specific aptamers
gggagaggagagguguggug

SEQ ID NO: 4191 - RNA, 21 nt, Artificial sequence
  specific aptamers
gggagaggaguggaagaggag

SEQ ID NO: 4192 - RNA, 21 nt, Artificial sequence
  specific aptamers
gggagaggaguggaagaggcg

SEQ ID NO: 4193 - RNA, 21 nt, Artificial sequence
  specific aptamers
gggagaggaguggaagaggug

SEQ ID NO: 4194 - RNA, 21 nt, Artificial sequence
  specific aptamers
gggagaggaguggaagcggag

SEQ ID NO: 4195 - RNA, 21 nt, Artificial sequence
  specific aptamers
gggagaggaguggaagcggcg

SEQ ID NO: 4196 - RNA, 21 nt, Artificial sequence
  specific aptamers
gggagaggaguggaagcggug

SEQ ID NO: 4197 - RNA, 21 nt, Artificial sequence
  specific aptamers
gggagaggaguggaaguggag

SEQ ID NO: 4198 - RNA, 21 nt, Artificial sequence
  specific aptamers
gggagaggaguggaaguggcg

SEQ ID NO: 4199 - RNA, 21 nt, Artificial sequence
  specific aptamers
gggagaggaguggaaguggug

SEQ ID NO: 4200 - RNA, 21 nt, Artificial sequence
  specific aptamers
gggagaggaguggaugaggag

SEQ ID NO: 4201 - RNA, 21 nt, Artificial sequence
  specific aptamers
gggagaggaguggaugaggcg

SEQ ID NO: 4202 - RNA, 21 nt, Artificial sequence
  specific aptamers
gggagaggaguggaugaggug

SEQ ID NO: 4203 - RNA, 21 nt, Artificial sequence
  specific aptamers
gggagaggaguggaugcggag

SEQ ID NO: 4204 - RNA, 21 nt, Artificial sequence
  specific aptamers
gggagaggaguggaugcggcg

SEQ ID NO: 4205 - RNA, 21 nt, Artificial sequence
  specific aptamers
gggagaggaguggaugcggug

SEQ ID NO: 4206 - RNA, 21 nt, Artificial sequence
  specific aptamers
gggagaggaguggauguggag

SEQ ID NO: 4207 - RNA, 21 nt, Artificial sequence
  specific aptamers
gggagaggaguggauguggcg

SEQ ID NO: 4208 - RNA, 21 nt, Artificial sequence
  specific aptamers
gggagaggaguggauguggug

SEQ ID NO: 4209 - RNA, 20 nt, Artificial sequence
  specific aptamers
gggagaggaguggagaggag

SEQ ID NO: 4210 - RNA, 20 nt, Artificial sequence
  specific aptamers
gggagaggaguggagaggcg

SEQ ID NO: 4211 - RNA, 20 nt, Artificial sequence
  specific aptamers
gggagaggaguggagaggug

SEQ ID NO: 4212 - RNA, 20 nt, Artificial sequence
  specific aptamers
gggagaggaguggagcggag

SEQ ID NO: 4213 - RNA, 20 nt, Artificial sequence
  specific aptamers
gggagaggaguggagcggcg

SEQ ID NO: 4214 - RNA, 20 nt, Artificial sequence
  specific aptamers
gggagaggaguggagcggug

SEQ ID NO: 4215 - RNA, 20 nt, Artificial sequence
  specific aptamers
gggagaggaguggaguggag

SEQ ID NO: 4216 - RNA, 20 nt, Artificial sequence
  specific aptamers
gggagaggaguggaguggcg

SEQ ID NO: 4217 - RNA, 20 nt, Artificial sequence
  specific aptamers
gggagaggaguggaguggug

SEQ ID NO: 4218 - RNA, 21 nt, Artificial sequence
  specific aptamers
gggagaggagugguagaggag

SEQ ID NO: 4219 - RNA, 21 nt, Artificial sequence
  specific aptamers
gggagaggagugguagaggcg

SEQ ID NO: 4220 - RNA, 21 nt, Artificial sequence
  specific aptamers
gggagaggagugguagaggug

SEQ ID NO: 4221 - RNA, 21 nt, Artificial sequence
  specific aptamers
gggagaggagugguagcggag

SEQ ID NO: 4222 - RNA, 21 nt, Artificial sequence
  specific aptamers
gggagaggagugguagcggcg

SEQ ID NO: 4223 - RNA, 21 nt, Artificial sequence
  specific aptamers
gggagaggagugguagcggug

SEQ ID NO: 4224 - RNA, 21 nt, Artificial sequence
  specific aptamers
gggagaggagugguaguggag

SEQ ID NO: 4225 - RNA, 21 nt, Artificial sequence
  specific aptamers
gggagaggagugguaguggcg

SEQ ID NO: 4226 - RNA, 21 nt, Artificial sequence
  specific aptamers
gggagaggagugguaguggug

SEQ ID NO: 4227 - RNA, 21 nt, Artificial sequence
  specific aptamers
gggagaggagugguugaggag

SEQ ID NO: 4228 - RNA, 21 nt, Artificial sequence
  specific aptamers
gggagaggagugguugaggcg

SEQ ID NO: 4229 - RNA, 21 nt, Artificial sequence
  specific aptamers
gggagaggagugguugaggug

SEQ ID NO: 4230 - RNA, 21 nt, Artificial sequence
  specific aptamers
gggagaggagugguugcggag

SEQ ID NO: 4231 - RNA, 21 nt, Artificial sequence
  specific aptamers
gggagaggagugguugcggcg

SEQ ID NO: 4232 - RNA, 21 nt, Artificial sequence
  specific aptamers
gggagaggagugguugcggug

SEQ ID NO: 4233 - RNA, 21 nt, Artificial sequence
  specific aptamers
gggagaggagugguuguggag

SEQ ID NO: 4234 - RNA, 21 nt, Artificial sequence
  specific aptamers
gggagaggagugguuguggcg

SEQ ID NO: 4235 - RNA, 21 nt, Artificial sequence
  specific aptamers
gggagaggagugguuguggug

SEQ ID NO: 4236 - RNA, 20 nt, Artificial sequence
  specific aptamers
gggagaggaguggugaggag

SEQ ID NO: 4237 - RNA, 20 nt, Artificial sequence
  specific aptamers
gggagaggaguggugaggcg

SEQ ID NO: 4238 - RNA, 20 nt, Artificial sequence
  specific aptamers
gggagaggaguggugaggug

SEQ ID NO: 4239 - RNA, 20 nt, Artificial sequence
  specific aptamers
gggagaggaguggugcggag

SEQ ID NO: 4240 - RNA, 20 nt, Artificial sequence
  specific aptamers
gggagaggaguggugcggcg

SEQ ID NO: 4241 - RNA, 20 nt, Artificial sequence
  specific aptamers
gggagaggaguggugcggug

SEQ ID NO: 4242 - RNA, 20 nt, Artificial sequence
  specific aptamers
gggagaggagugguguggag

SEQ ID NO: 4243 - RNA, 20 nt, Artificial sequence
  specific aptamers
gggagaggagugguguggcg

SEQ ID NO: 4244 - RNA, 20 nt, Artificial sequence
  specific aptamers
gggagaggagugguguggug

SEQ ID NO: 4245 - RNA, 21 nt, Artificial sequence
  specific aptamers
gggagaggugaggaagaggag

SEQ ID NO: 4246 - RNA, 21 nt, Artificial sequence
  specific aptamers
gggagaggugaggaagaggcg

SEQ ID NO: 4247 - RNA, 21 nt, Artificial sequence
  specific aptamers
gggagaggugaggaagaggug

SEQ ID NO: 4248 - RNA, 21 nt, Artificial sequence
  specific aptamers
gggagaggugaggaagcggag

SEQ ID NO: 4249 - RNA, 21 nt, Artificial sequence
  specific aptamers
gggagaggugaggaagcggcg

SEQ ID NO: 4250 - RNA, 21 nt, Artificial sequence
  specific aptamers
gggagaggugaggaagcggug

SEQ ID NO: 4251 - RNA, 21 nt, Artificial sequence
  specific aptamers
gggagaggugaggaaguggag

SEQ ID NO: 4252 - RNA, 21 nt, Artificial sequence
  specific aptamers
gggagaggugaggaaguggcg

SEQ ID NO: 4253 - RNA, 21 nt, Artificial sequence
  specific aptamers
gggagaggugaggaaguggug

SEQ ID NO: 4254 - RNA, 21 nt, Artificial sequence
  specific aptamers
gggagaggugaggaugaggag

SEQ ID NO: 4255 - RNA, 21 nt, Artificial sequence
  specific aptamers
gggagaggugaggaugaggcg

SEQ ID NO: 4256 - RNA, 21 nt, Artificial sequence
  specific aptamers
gggagaggugaggaugaggug

SEQ ID NO: 4257 - RNA, 21 nt, Artificial sequence
  specific aptamers
gggagaggugaggaugcggag

SEQ ID NO: 4258 - RNA, 21 nt, Artificial sequence
  specific aptamers
gggagaggugaggaugcggcg

SEQ ID NO: 4259 - RNA, 21 nt, Artificial sequence
  specific aptamers
gggagaggugaggaugcggug

SEQ ID NO: 4260 - RNA, 21 nt, Artificial sequence
  specific aptamers
gggagaggugaggauguggag

SEQ ID NO: 4261 - RNA, 21 nt, Artificial sequence
  specific aptamers
gggagaggugaggauguggcg

SEQ ID NO: 4262 - RNA, 21 nt, Artificial sequence
  specific aptamers
gggagaggugaggauguggug

SEQ ID NO: 4263 - RNA, 20 nt, Artificial sequence
  specific aptamers
gggagaggugaggagaggag

SEQ ID NO: 4264 - RNA, 20 nt, Artificial sequence
  specific aptamers
gggagaggugaggagaggcg

SEQ ID NO: 4265 - RNA, 20 nt, Artificial sequence
  specific aptamers
gggagaggugaggagaggug

SEQ ID NO: 4266 - RNA, 20 nt, Artificial sequence
  specific aptamers
gggagaggugaggagcggag

SEQ ID NO: 4267 - RNA, 20 nt, Artificial sequence
  specific aptamers
gggagaggugaggagcggcg

SEQ ID NO: 4268 - RNA, 20 nt, Artificial sequence
  specific aptamers
gggagaggugaggagcggug

SEQ ID NO: 4269 - RNA, 20 nt, Artificial sequence
  specific aptamers
gggagaggugaggaguggag

SEQ ID NO: 4270 - RNA, 20 nt, Artificial sequence
  specific aptamers
gggagaggugaggaguggcg

SEQ ID NO: 4271 - RNA, 20 nt, Artificial sequence
  specific aptamers
gggagaggugaggaguggug

SEQ ID NO: 4272 - RNA, 21 nt, Artificial sequence
  specific aptamers
gggagaggugagguagaggag

SEQ ID NO: 4273 - RNA, 21 nt, Artificial sequence
  specific aptamers
gggagaggugagguagaggcg

SEQ ID NO: 4274 - RNA, 21 nt, Artificial sequence
  specific aptamers
gggagaggugagguagaggug

SEQ ID NO: 4275 - RNA, 21 nt, Artificial sequence
  specific aptamers
gggagaggugagguagcggag

SEQ ID NO: 4276 - RNA, 21 nt, Artificial sequence
  specific aptamers
gggagaggugagguagcggcg

SEQ ID NO: 4277 - RNA, 21 nt, Artificial sequence
  specific aptamers
gggagaggugagguagcggug

SEQ ID NO: 4278 - RNA, 21 nt, Artificial sequence
  specific aptamers
gggagaggugagguaguggag

SEQ ID NO: 4279 - RNA, 21 nt, Artificial sequence
  specific aptamers
gggagaggugagguaguggcg

SEQ ID NO: 4280 - RNA, 21 nt, Artificial sequence
  specific aptamers
gggagaggugagguaguggug

SEQ ID NO: 4281 - RNA, 21 nt, Artificial sequence
  specific aptamers
gggagaggugagguugaggag

SEQ ID NO: 4282 - RNA, 21 nt, Artificial sequence
  specific aptamers
gggagaggugagguugaggcg

SEQ ID NO: 4283 - RNA, 21 nt, Artificial sequence
  specific aptamers
gggagaggugagguugaggug

SEQ ID NO: 4284 - RNA, 21 nt, Artificial sequence
  specific aptamers
gggagaggugagguugcggag

SEQ ID NO: 4285 - RNA, 21 nt, Artificial sequence
  specific aptamers
gggagaggugagguugcggcg

SEQ ID NO: 4286 - RNA, 21 nt, Artificial sequence
  specific aptamers
gggagaggugagguugcggug

SEQ ID NO: 4287 - RNA, 21 nt, Artificial sequence
  specific aptamers
gggagaggugagguuguggag

SEQ ID NO: 4288 - RNA, 21 nt, Artificial sequence
  specific aptamers
gggagaggugagguuguggcg

SEQ ID NO: 4289 - RNA, 21 nt, Artificial sequence
  specific aptamers
gggagaggugagguuguggug

SEQ ID NO: 4290 - RNA, 20 nt, Artificial sequence
  specific aptamers
gggagaggugaggugaggag

SEQ ID NO: 4291 - RNA, 20 nt, Artificial sequence
  specific aptamers
gggagaggugaggugaggcg

SEQ ID NO: 4292 - RNA, 20 nt, Artificial sequence
  specific aptamers
gggagaggugaggugaggug

SEQ ID NO: 4293 - RNA, 20 nt, Artificial sequence
  specific aptamers
gggagaggugaggugcggag

SEQ ID NO: 4294 - RNA, 20 nt, Artificial sequence
  specific aptamers
gggagaggugaggugcggcg

SEQ ID NO: 4295 - RNA, 20 nt, Artificial sequence
  specific aptamers
gggagaggugaggugcggug

SEQ ID NO: 4296 - RNA, 20 nt, Artificial sequence
  specific aptamers
gggagaggugagguguggag

SEQ ID NO: 4297 - RNA, 20 nt, Artificial sequence
  specific aptamers
gggagaggugagguguggcg

SEQ ID NO: 4298 - RNA, 20 nt, Artificial sequence
  specific aptamers
gggagaggugagguguggug

SEQ ID NO: 4299 - RNA, 21 nt, Artificial sequence
  specific aptamers
gggagagguguggaagaggag

SEQ ID NO: 4300 - RNA, 21 nt, Artificial sequence
  specific aptamers
gggagagguguggaagaggcg

SEQ ID NO: 4301 - RNA, 21 nt, Artificial sequence
  specific aptamers
gggagagguguggaagaggug

SEQ ID NO: 4302 - RNA, 21 nt, Artificial sequence
  specific aptamers
gggagagguguggaagcggag

SEQ ID NO: 4303 - RNA, 21 nt, Artificial sequence
  specific aptamers
gggagagguguggaagcggcg

SEQ ID NO: 4304 - RNA, 21 nt, Artificial sequence
  specific aptamers
gggagagguguggaagcggug

SEQ ID NO: 4305 - RNA, 21 nt, Artificial sequence
  specific aptamers
gggagagguguggaaguggag

SEQ ID NO: 4306 - RNA, 21 nt, Artificial sequence
  specific aptamers
gggagagguguggaaguggcg

SEQ ID NO: 4307 - RNA, 21 nt, Artificial sequence
  specific aptamers
gggagagguguggaaguggug

SEQ ID NO: 4308 - RNA, 21 nt, Artificial sequence
  specific aptamers
gggagagguguggaugaggag

SEQ ID NO: 4309 - RNA, 21 nt, Artificial sequence
  specific aptamers
gggagagguguggaugaggcg

SEQ ID NO: 4310 - RNA, 21 nt, Artificial sequence
  specific aptamers
gggagagguguggaugaggug

SEQ ID NO: 4311 - RNA, 21 nt, Artificial sequence
  specific aptamers
gggagagguguggaugcggag

SEQ ID NO: 4312 - RNA, 21 nt, Artificial sequence
  specific aptamers
gggagagguguggaugcggcg

SEQ ID NO: 4313 - RNA, 21 nt, Artificial sequence
  specific aptamers
gggagagguguggaugcggug

SEQ ID NO: 4314 - RNA, 21 nt, Artificial sequence
  specific aptamers
gggagagguguggauguggag

SEQ ID NO: 4315 - RNA, 21 nt, Artificial sequence
  specific aptamers
gggagagguguggauguggcg

SEQ ID NO: 4316 - RNA, 21 nt, Artificial sequence
  specific aptamers
gggagagguguggauguggug

SEQ ID NO: 4317 - RNA, 20 nt, Artificial sequence
  specific aptamers
gggagagguguggagaggag

SEQ ID NO: 4318 - RNA, 20 nt, Artificial sequence
  specific aptamers
gggagagguguggagaggcg

SEQ ID NO: 4319 - RNA, 20 nt, Artificial sequence
  specific aptamers
gggagagguguggagaggug

SEQ ID NO: 4320 - RNA, 20 nt, Artificial sequence
  specific aptamers
gggagagguguggagcggag

SEQ ID NO: 4321 - RNA, 20 nt, Artificial sequence
  specific aptamers
gggagagguguggagcggcg

SEQ ID NO: 4322 - RNA, 20 nt, Artificial sequence
  specific aptamers
gggagagguguggagcggug

SEQ ID NO: 4323 - RNA, 20 nt, Artificial sequence
  specific aptamers
gggagagguguggaguggag

SEQ ID NO: 4324 - RNA, 20 nt, Artificial sequence
  specific aptamers
gggagagguguggaguggcg

SEQ ID NO: 4325 - RNA, 20 nt, Artificial sequence
  specific aptamers
gggagagguguggaguggug

SEQ ID NO: 4326 - RNA, 21 nt, Artificial sequence
  specific aptamers
gggagaggugugguagaggag

SEQ ID NO: 4327 - RNA, 21 nt, Artificial sequence
  specific aptamers
gggagaggugugguagaggcg

SEQ ID NO: 4328 - RNA, 21 nt, Artificial sequence
  specific aptamers
gggagaggugugguagaggug

SEQ ID NO: 4329 - RNA, 21 nt, Artificial sequence
  specific aptamers
gggagaggugugguagcggag

SEQ ID NO: 4330 - RNA, 21 nt, Artificial sequence
  specific aptamers
gggagaggugugguagcggcg

SEQ ID NO: 4331 - RNA, 21 nt, Artificial sequence
  specific aptamers
gggagaggugugguagcggug

SEQ ID NO: 4332 - RNA, 21 nt, Artificial sequence
  specific aptamers
gggagaggugugguaguggag

SEQ ID NO: 4333 - RNA, 21 nt, Artificial sequence
  specific aptamers
gggagaggugugguaguggcg

SEQ ID NO: 4334 - RNA, 21 nt, Artificial sequence
  specific aptamers
gggagaggugugguaguggug

SEQ ID NO: 4335 - RNA, 21 nt, Artificial sequence
  specific aptamers
gggagaggugugguugaggag

SEQ ID NO: 4336 - RNA, 21 nt, Artificial sequence
  specific aptamers
gggagaggugugguugaggcg

SEQ ID NO: 4337 - RNA, 21 nt, Artificial sequence
  specific aptamers
gggagaggugugguugaggug

SEQ ID NO: 4338 - RNA, 21 nt, Artificial sequence
  specific aptamers
gggagaggugugguugcggag

SEQ ID NO: 4339 - RNA, 21 nt, Artificial sequence
  specific aptamers
gggagaggugugguugcggcg

SEQ ID NO: 4340 - RNA, 21 nt, Artificial sequence
  specific aptamers
gggagaggugugguugcggug

SEQ ID NO: 4341 - RNA, 21 nt, Artificial sequence
  specific aptamers
gggagaggugugguuguggag

SEQ ID NO: 4342 - RNA, 21 nt, Artificial sequence
  specific aptamers
gggagaggugugguuguggcg

SEQ ID NO: 4343 - RNA, 21 nt, Artificial sequence
  specific aptamers
gggagaggugugguuguggug

SEQ ID NO: 4344 - RNA, 20 nt, Artificial sequence
  specific aptamers
gggagagguguggugaggag

SEQ ID NO: 4345 - RNA, 20 nt, Artificial sequence
  specific aptamers
gggagagguguggugaggcg

SEQ ID NO: 4346 - RNA, 20 nt, Artificial sequence
  specific aptamers
gggagagguguggugaggug

SEQ ID NO: 4347 - RNA, 20 nt, Artificial sequence
  specific aptamers
gggagagguguggugcggag

SEQ ID NO: 4348 - RNA, 20 nt, Artificial sequence
  specific aptamers
gggagagguguggugcggcg

SEQ ID NO: 4349 - RNA, 20 nt, Artificial sequence
  specific aptamers
gggagagguguggugcggug

SEQ ID NO: 4350 - RNA, 20 nt, Artificial sequence
  specific aptamers
gggagaggugugguguggag

SEQ ID NO: 4351 - RNA, 20 nt, Artificial sequence
  specific aptamers
gggagaggugugguguggcg

SEQ ID NO: 4352 - RNA, 20 nt, Artificial sequence
  specific aptamers
gggagaggugugguguggug

SEQ ID NO: 4353 - RNA, 21 nt, Artificial sequence
  specific aptamers
gggaguggagaggaagaggag

SEQ ID NO: 4354 - RNA, 21 nt, Artificial sequence
  specific aptamers
gggaguggagaggaagaggcg

SEQ ID NO: 4355 - RNA, 21 nt, Artificial sequence
  specific aptamers
gggaguggagaggaagaggug

SEQ ID NO: 4356 - RNA, 21 nt, Artificial sequence
  specific aptamers
gggaguggagaggaagcggag

SEQ ID NO: 4357 - RNA, 21 nt, Artificial sequence
  specific aptamers
gggaguggagaggaagcggcg

SEQ ID NO: 4358 - RNA, 21 nt, Artificial sequence
  specific aptamers
gggaguggagaggaagcggug

SEQ ID NO: 4359 - RNA, 21 nt, Artificial sequence
  specific aptamers
gggaguggagaggaaguggag

SEQ ID NO: 4360 - RNA, 21 nt, Artificial sequence
  specific aptamers
gggaguggagaggaaguggcg

SEQ ID NO: 4361 - RNA, 21 nt, Artificial sequence
  specific aptamers
gggaguggagaggaaguggug

SEQ ID NO: 4362 - RNA, 21 nt, Artificial sequence
  specific aptamers
gggaguggagaggaugaggag

SEQ ID NO: 4363 - RNA, 21 nt, Artificial sequence
  specific aptamers
gggaguggagaggaugaggcg

SEQ ID NO: 4364 - RNA, 21 nt, Artificial sequence
  specific aptamers
gggaguggagaggaugaggug

SEQ ID NO: 4365 - RNA, 21 nt, Artificial sequence
  specific aptamers
gggaguggagaggaugcggag

SEQ ID NO: 4366 - RNA, 21 nt, Artificial sequence
  specific aptamers
gggaguggagaggaugcggcg

SEQ ID NO: 4367 - RNA, 21 nt, Artificial sequence
  specific aptamers
gggaguggagaggaugcggug

SEQ ID NO: 4368 - RNA, 21 nt, Artificial sequence
  specific aptamers
gggaguggagaggauguggag

SEQ ID NO: 4369 - RNA, 21 nt, Artificial sequence
  specific aptamers
gggaguggagaggauguggcg

SEQ ID NO: 4370 - RNA, 21 nt, Artificial sequence
  specific aptamers
gggaguggagaggauguggug

SEQ ID NO: 4371 - RNA, 20 nt, Artificial sequence
  specific aptamers
gggaguggagaggagaggag

SEQ ID NO: 4372 - RNA, 20 nt, Artificial sequence
  specific aptamers
gggaguggagaggagaggcg

SEQ ID NO: 4373 - RNA, 20 nt, Artificial sequence
  specific aptamers
gggaguggagaggagaggug

SEQ ID NO: 4374 - RNA, 20 nt, Artificial sequence
  specific aptamers
gggaguggagaggagcggag

SEQ ID NO: 4375 - RNA, 20 nt, Artificial sequence
  specific aptamers
gggaguggagaggagcggcg

SEQ ID NO: 4376 - RNA, 20 nt, Artificial sequence
  specific aptamers
gggaguggagaggagcggug

SEQ ID NO: 4377 - RNA, 20 nt, Artificial sequence
  specific aptamers
gggaguggagaggaguggag

SEQ ID NO: 4378 - RNA, 20 nt, Artificial sequence
  specific aptamers
gggaguggagaggaguggcg

SEQ ID NO: 4379 - RNA, 20 nt, Artificial sequence
  specific aptamers
gggaguggagaggaguggug

SEQ ID NO: 4380 - RNA, 21 nt, Artificial sequence
  specific aptamers
gggaguggagagguagaggag

SEQ ID NO: 4381 - RNA, 21 nt, Artificial sequence
  specific aptamers
gggaguggagagguagaggcg

SEQ ID NO: 4382 - RNA, 21 nt, Artificial sequence
  specific aptamers
gggaguggagagguagaggug

SEQ ID NO: 4383 - RNA, 21 nt, Artificial sequence
  specific aptamers
gggaguggagagguagcggag

SEQ ID NO: 4384 - RNA, 21 nt, Artificial sequence
  specific aptamers
gggaguggagagguagcggcg

SEQ ID NO: 4385 - RNA, 21 nt, Artificial sequence
  specific aptamers
gggaguggagagguagcggug

SEQ ID NO: 4386 - RNA, 21 nt, Artificial sequence
  specific aptamers
gggaguggagagguaguggag

SEQ ID NO: 4387 - RNA, 21 nt, Artificial sequence
  specific aptamers
gggaguggagagguaguggcg

SEQ ID NO: 4388 - RNA, 21 nt, Artificial sequence
  specific aptamers
gggaguggagagguaguggug

SEQ ID NO: 4389 - RNA, 21 nt, Artificial sequence
  specific aptamers
gggaguggagagguugaggag

SEQ ID NO: 4390 - RNA, 21 nt, Artificial sequence
  specific aptamers
gggaguggagagguugaggcg

SEQ ID NO: 4391 - RNA, 21 nt, Artificial sequence
  specific aptamers
gggaguggagagguugaggug

SEQ ID NO: 4392 - RNA, 21 nt, Artificial sequence
  specific aptamers
gggaguggagagguugcggag

SEQ ID NO: 4393 - RNA, 21 nt, Artificial sequence
  specific aptamers
gggaguggagagguugcggcg

SEQ ID NO: 4394 - RNA, 21 nt, Artificial sequence
  specific aptamers
gggaguggagagguugcggug

SEQ ID NO: 4395 - RNA, 21 nt, Artificial sequence
  specific aptamers
gggaguggagagguuguggag

SEQ ID NO: 4396 - RNA, 21 nt, Artificial sequence
  specific aptamers
gggaguggagagguuguggcg

SEQ ID NO: 4397 - RNA, 21 nt, Artificial sequence
  specific aptamers
gggaguggagagguuguggug

SEQ ID NO: 4398 - RNA, 20 nt, Artificial sequence
  specific aptamers
gggaguggagaggugaggag

SEQ ID NO: 4399 - RNA, 20 nt, Artificial sequence
  specific aptamers
gggaguggagaggugaggcg

SEQ ID NO: 4400 - RNA, 20 nt, Artificial sequence
  specific aptamers
gggaguggagaggugaggug

SEQ ID NO: 4401 - RNA, 20 nt, Artificial sequence
  specific aptamers
gggaguggagaggugcggag

SEQ ID NO: 4402 - RNA, 20 nt, Artificial sequence
  specific aptamers
gggaguggagaggugcggcg

SEQ ID NO: 4403 - RNA, 20 nt, Artificial sequence
  specific aptamers
gggaguggagaggugcggug

SEQ ID NO: 4404 - RNA, 20 nt, Artificial sequence
  specific aptamers
gggaguggagagguguggag

SEQ ID NO: 4405 - RNA, 20 nt, Artificial sequence
  specific aptamers
gggaguggagagguguggcg

SEQ ID NO: 4406 - RNA, 20 nt, Artificial sequence
  specific aptamers
gggaguggagagguguggug

SEQ ID NO: 4407 - RNA, 21 nt, Artificial sequence
  specific aptamers
gggaguggaguggaagaggag

SEQ ID NO: 4408 - RNA, 21 nt, Artificial sequence
  specific aptamers
gggaguggaguggaagaggcg

SEQ ID NO: 4409 - RNA, 21 nt, Artificial sequence
  specific aptamers
gggaguggaguggaagaggug

SEQ ID NO: 4410 - RNA, 21 nt, Artificial sequence
  specific aptamers
gggaguggaguggaagcggag

SEQ ID NO: 4411 - RNA, 21 nt, Artificial sequence
  specific aptamers
gggaguggaguggaagcggcg

SEQ ID NO: 4412 - RNA, 21 nt, Artificial sequence
  specific aptamers
gggaguggaguggaagcggug

SEQ ID NO: 4413 - RNA, 21 nt, Artificial sequence
  specific aptamers
gggaguggaguggaaguggag

SEQ ID NO: 4414 - RNA, 21 nt, Artificial sequence
  specific aptamers
gggaguggaguggaaguggcg

SEQ ID NO: 4415 - RNA, 21 nt, Artificial sequence
  specific aptamers
gggaguggaguggaaguggug

SEQ ID NO: 4416 - RNA, 21 nt, Artificial sequence
  specific aptamers
gggaguggaguggaugaggag

SEQ ID NO: 4417 - RNA, 21 nt, Artificial sequence
  specific aptamers
gggaguggaguggaugaggcg

SEQ ID NO: 4418 - RNA, 21 nt, Artificial sequence
  specific aptamers
gggaguggaguggaugaggug

SEQ ID NO: 4419 - RNA, 21 nt, Artificial sequence
  specific aptamers
gggaguggaguggaugcggag

SEQ ID NO: 4420 - RNA, 21 nt, Artificial sequence
  specific aptamers
gggaguggaguggaugcggcg

SEQ ID NO: 4421 - RNA, 21 nt, Artificial sequence
  specific aptamers
gggaguggaguggaugcggug

SEQ ID NO: 4422 - RNA, 21 nt, Artificial sequence
  specific aptamers
gggaguggaguggauguggag

SEQ ID NO: 4423 - RNA, 21 nt, Artificial sequence
  specific aptamers
gggaguggaguggauguggcg

SEQ ID NO: 4424 - RNA, 21 nt, Artificial sequence
  specific aptamers
gggaguggaguggauguggug

SEQ ID NO: 4425 - RNA, 20 nt, Artificial sequence
  specific aptamers
gggaguggaguggagaggag

SEQ ID NO: 4426 - RNA, 20 nt, Artificial sequence
  specific aptamers
gggaguggaguggagaggcg

SEQ ID NO: 4427 - RNA, 20 nt, Artificial sequence
  specific aptamers
gggaguggaguggagaggug

SEQ ID NO: 4428 - RNA, 20 nt, Artificial sequence
  specific aptamers
gggaguggaguggagcggag

SEQ ID NO: 4429 - RNA, 20 nt, Artificial sequence
  specific aptamers
gggaguggaguggagcggcg

SEQ ID NO: 4430 - RNA, 20 nt, Artificial sequence
  specific aptamers
gggaguggaguggagcggug

SEQ ID NO: 4431 - RNA, 20 nt, Artificial sequence
  specific aptamers
gggaguggaguggaguggag

SEQ ID NO: 4432 - RNA, 20 nt, Artificial sequence
  specific aptamers
gggaguggaguggaguggcg

SEQ ID NO: 4433 - RNA, 20 nt, Artificial sequence
  specific aptamers
gggaguggaguggaguggug

SEQ ID NO: 4434 - RNA, 21 nt, Artificial sequence
  specific aptamers
gggaguggagugguagaggag

SEQ ID NO: 4435 - RNA, 21 nt, Artificial sequence
  specific aptamers
gggaguggagugguagaggcg

SEQ ID NO: 4436 - RNA, 21 nt, Artificial sequence
  specific aptamers
gggaguggagugguagaggug

SEQ ID NO: 4437 - RNA, 21 nt, Artificial sequence
  specific aptamers
gggaguggagugguagcggag

SEQ ID NO: 4438 - RNA, 21 nt, Artificial sequence
  specific aptamers
gggaguggagugguagcggcg

SEQ ID NO: 4439 - RNA, 21 nt, Artificial sequence
  specific aptamers
gggaguggagugguagcggug

SEQ ID NO: 4440 - RNA, 21 nt, Artificial sequence
  specific aptamers
gggaguggagugguaguggag

SEQ ID NO: 4441 - RNA, 21 nt, Artificial sequence
  specific aptamers
gggaguggagugguaguggcg

SEQ ID NO: 4442 - RNA, 21 nt, Artificial sequence
  specific aptamers
gggaguggagugguaguggug

SEQ ID NO: 4443 - RNA, 21 nt, Artificial sequence
  specific aptamers
gggaguggagugguugaggag

SEQ ID NO: 4444 - RNA, 21 nt, Artificial sequence
  specific aptamers
gggaguggagugguugaggcg

SEQ ID NO: 4445 - RNA, 21 nt, Artificial sequence
  specific aptamers
gggaguggagugguugaggug

SEQ ID NO: 4446 - RNA, 21 nt, Artificial sequence
  specific aptamers
gggaguggagugguugcggag

SEQ ID NO: 4447 - RNA, 21 nt, Artificial sequence
  specific aptamers
gggaguggagugguugcggcg

SEQ ID NO: 4448 - RNA, 21 nt, Artificial sequence
  specific aptamers
gggaguggagugguugcggug

SEQ ID NO: 4449 - RNA, 21 nt, Artificial sequence
  specific aptamers
gggaguggagugguuguggag

SEQ ID NO: 4450 - RNA, 21 nt, Artificial sequence
  specific aptamers
gggaguggagugguuguggcg

SEQ ID NO: 4451 - RNA, 21 nt, Artificial sequence
  specific aptamers
gggaguggagugguuguggug

SEQ ID NO: 4452 - RNA, 20 nt, Artificial sequence
  specific aptamers
gggaguggaguggugaggag

SEQ ID NO: 4453 - RNA, 20 nt, Artificial sequence
  specific aptamers
gggaguggaguggugaggcg

SEQ ID NO: 4454 - RNA, 20 nt, Artificial sequence
  specific aptamers
gggaguggaguggugaggug

SEQ ID NO: 4455 - RNA, 20 nt, Artificial sequence
  specific aptamers
gggaguggaguggugcggag

SEQ ID NO: 4456 - RNA, 20 nt, Artificial sequence
  specific aptamers
gggaguggaguggugcggcg

SEQ ID NO: 4457 - RNA, 20 nt, Artificial sequence
  specific aptamers
gggaguggaguggugcggug

SEQ ID NO: 4458 - RNA, 20 nt, Artificial sequence
  specific aptamers
gggaguggagugguguggag

SEQ ID NO: 4459 - RNA, 20 nt, Artificial sequence
  specific aptamers
gggaguggagugguguggcg

SEQ ID NO: 4460 - RNA, 20 nt, Artificial sequence
  specific aptamers
gggaguggagugguguggug

SEQ ID NO: 4461 - RNA, 21 nt, Artificial sequence
  specific aptamers
gggaguggugaggaagaggag

SEQ ID NO: 4462 - RNA, 21 nt, Artificial sequence
  specific aptamers
gggaguggugaggaagaggcg

SEQ ID NO: 4463 - RNA, 21 nt, Artificial sequence
  specific aptamers
gggaguggugaggaagaggug

SEQ ID NO: 4464 - RNA, 21 nt, Artificial sequence
  specific aptamers
gggaguggugaggaagcggag

SEQ ID NO: 4465 - RNA, 21 nt, Artificial sequence
  specific aptamers
gggaguggugaggaagcggcg

SEQ ID NO: 4466 - RNA, 21 nt, Artificial sequence
  specific aptamers
gggaguggugaggaagcggug

SEQ ID NO: 4467 - RNA, 21 nt, Artificial sequence
  specific aptamers
gggaguggugaggaaguggag

SEQ ID NO: 4468 - RNA, 21 nt, Artificial sequence
  specific aptamers
gggaguggugaggaaguggcg

SEQ ID NO: 4469 - RNA, 21 nt, Artificial sequence
  specific aptamers
gggaguggugaggaaguggug

SEQ ID NO: 4470 - RNA, 21 nt, Artificial sequence
  specific aptamers
gggaguggugaggaugaggag

SEQ ID NO: 4471 - RNA, 21 nt, Artificial sequence
  specific aptamers
gggaguggugaggaugaggcg

SEQ ID NO: 4472 - RNA, 21 nt, Artificial sequence
  specific aptamers
gggaguggugaggaugaggug

SEQ ID NO: 4473 - RNA, 21 nt, Artificial sequence
  specific aptamers
gggaguggugaggaugcggag

SEQ ID NO: 4474 - RNA, 21 nt, Artificial sequence
  specific aptamers
gggaguggugaggaugcggcg

SEQ ID NO: 4475 - RNA, 21 nt, Artificial sequence
  specific aptamers
gggaguggugaggaugcggug

SEQ ID NO: 4476 - RNA, 21 nt, Artificial sequence
  specific aptamers
gggaguggugaggauguggag

SEQ ID NO: 4477 - RNA, 21 nt, Artificial sequence
  specific aptamers
gggaguggugaggauguggcg

SEQ ID NO: 4478 - RNA, 21 nt, Artificial sequence
  specific aptamers
gggaguggugaggauguggug

SEQ ID NO: 4479 - RNA, 20 nt, Artificial sequence
  specific aptamers
gggaguggugaggagaggag

SEQ ID NO: 4480 - RNA, 20 nt, Artificial sequence
  specific aptamers
gggaguggugaggagaggcg

SEQ ID NO: 4481 - RNA, 20 nt, Artificial sequence
  specific aptamers
gggaguggugaggagaggug

SEQ ID NO: 4482 - RNA, 20 nt, Artificial sequence
  specific aptamers
gggaguggugaggagcggag

SEQ ID NO: 4483 - RNA, 20 nt, Artificial sequence
  specific aptamers
gggaguggugaggagcggcg

SEQ ID NO: 4484 - RNA, 20 nt, Artificial sequence
  specific aptamers
gggaguggugaggagcggug

SEQ ID NO: 4485 - RNA, 20 nt, Artificial sequence
  specific aptamers
gggaguggugaggaguggag

SEQ ID NO: 4486 - RNA, 20 nt, Artificial sequence
  specific aptamers
gggaguggugaggaguggcg

SEQ ID NO: 4487 - RNA, 20 nt, Artificial sequence
  specific aptamers
gggaguggugaggaguggug

SEQ ID NO: 4488 - RNA, 21 nt, Artificial sequence
  specific aptamers
gggaguggugagguagaggag

SEQ ID NO: 4489 - RNA, 21 nt, Artificial sequence
  specific aptamers
gggaguggugagguagaggcg

SEQ ID NO: 4490 - RNA, 21 nt, Artificial sequence
  specific aptamers
gggaguggugagguagaggug

SEQ ID NO: 4491 - RNA, 21 nt, Artificial sequence
  specific aptamers
gggaguggugagguagcggag

SEQ ID NO: 4492 - RNA, 21 nt, Artificial sequence
  specific aptamers
gggaguggugagguagcggcg

SEQ ID NO: 4493 - RNA, 21 nt, Artificial sequence
  specific aptamers
gggaguggugagguagcggug

SEQ ID NO: 4494 - RNA, 21 nt, Artificial sequence
  specific aptamers
gggaguggugagguaguggag

SEQ ID NO: 4495 - RNA, 21 nt, Artificial sequence
  specific aptamers
gggaguggugagguaguggcg

SEQ ID NO: 4496 - RNA, 21 nt, Artificial sequence
  specific aptamers
gggaguggugagguaguggug

SEQ ID NO: 4497 - RNA, 21 nt, Artificial sequence
  specific aptamers
gggaguggugagguugaggag

SEQ ID NO: 4498 - RNA, 21 nt, Artificial sequence
  specific aptamers
gggaguggugagguugaggcg

SEQ ID NO: 4499 - RNA, 21 nt, Artificial sequence
  specific aptamers
gggaguggugagguugaggug

SEQ ID NO: 4500 - RNA, 21 nt, Artificial sequence
  specific aptamers
gggaguggugagguugcggag

SEQ ID NO: 4501 - RNA, 21 nt, Artificial sequence
  specific aptamers
gggaguggugagguugcggcg

SEQ ID NO: 4502 - RNA, 21 nt, Artificial sequence
  specific aptamers
gggaguggugagguugcggug

SEQ ID NO: 4503 - RNA, 21 nt, Artificial sequence
  specific aptamers
gggaguggugagguuguggag

SEQ ID NO: 4504 - RNA, 21 nt, Artificial sequence
  specific aptamers
gggaguggugagguuguggcg

SEQ ID NO: 4505 - RNA, 21 nt, Artificial sequence
  specific aptamers
gggaguggugagguuguggug

SEQ ID NO: 4506 - RNA, 20 nt, Artificial sequence
  specific aptamers
gggaguggugaggugaggag

SEQ ID NO: 4507 - RNA, 20 nt, Artificial sequence
  specific aptamers
gggaguggugaggugaggcg

SEQ ID NO: 4508 - RNA, 20 nt, Artificial sequence
  specific aptamers
gggaguggugaggugaggug

SEQ ID NO: 4509 - RNA, 20 nt, Artificial sequence
  specific aptamers
gggaguggugaggugcggag

SEQ ID NO: 4510 - RNA, 20 nt, Artificial sequence
  specific aptamers
gggaguggugaggugcggcg

SEQ ID NO: 4511 - RNA, 20 nt, Artificial sequence
  specific aptamers
gggaguggugaggugcggug

SEQ ID NO: 4512 - RNA, 20 nt, Artificial sequence
  specific aptamers
gggaguggugagguguggag

SEQ ID NO: 4513 - RNA, 20 nt, Artificial sequence
  specific aptamers
gggaguggugagguguggcg

SEQ ID NO: 4514 - RNA, 20 nt, Artificial sequence
  specific aptamers
gggaguggugagguguggug

SEQ ID NO: 4515 - RNA, 21 nt, Artificial sequence
  specific aptamers
gggagugguguggaagaggag

SEQ ID NO: 4516 - RNA, 21 nt, Artificial sequence
  specific aptamers
gggagugguguggaagaggcg

SEQ ID NO: 4517 - RNA, 21 nt, Artificial sequence
  specific aptamers
gggagugguguggaagaggug

SEQ ID NO: 4518 - RNA, 21 nt, Artificial sequence
  specific aptamers
gggagugguguggaagcggag

SEQ ID NO: 4519 - RNA, 21 nt, Artificial sequence
  specific aptamers
gggagugguguggaagcggcg

SEQ ID NO: 4520 - RNA, 21 nt, Artificial sequence
  specific aptamers
gggagugguguggaagcggug

SEQ ID NO: 4521 - RNA, 21 nt, Artificial sequence
  specific aptamers
gggagugguguggaaguggag

SEQ ID NO: 4522 - RNA, 21 nt, Artificial sequence
  specific aptamers
gggagugguguggaaguggcg

SEQ ID NO: 4523 - RNA, 21 nt, Artificial sequence
  specific aptamers
gggagugguguggaaguggug

SEQ ID NO: 4524 - RNA, 21 nt, Artificial sequence
  specific aptamers
gggagugguguggaugaggag

SEQ ID NO: 4525 - RNA, 21 nt, Artificial sequence
  specific aptamers
gggagugguguggaugaggcg

SEQ ID NO: 4526 - RNA, 21 nt, Artificial sequence
  specific aptamers
gggagugguguggaugaggug

SEQ ID NO: 4527 - RNA, 21 nt, Artificial sequence
  specific aptamers
gggagugguguggaugcggag

SEQ ID NO: 4528 - RNA, 21 nt, Artificial sequence
  specific aptamers
gggagugguguggaugcggcg

SEQ ID NO: 4529 - RNA, 21 nt, Artificial sequence
  specific aptamers
gggagugguguggaugcggug

SEQ ID NO: 4530 - RNA, 21 nt, Artificial sequence
  specific aptamers
gggagugguguggauguggag

SEQ ID NO: 4531 - RNA, 21 nt, Artificial sequence
  specific aptamers
gggagugguguggauguggcg

SEQ ID NO: 4532 - RNA, 21 nt, Artificial sequence
  specific aptamers
gggagugguguggauguggug

SEQ ID NO: 4533 - RNA, 20 nt, Artificial sequence
  specific aptamers
gggagugguguggagaggag

SEQ ID NO: 4534 - RNA, 20 nt, Artificial sequence
  specific aptamers
gggagugguguggagaggcg

SEQ ID NO: 4535 - RNA, 20 nt, Artificial sequence
  specific aptamers
gggagugguguggagaggug

SEQ ID NO: 4536 - RNA, 20 nt, Artificial sequence
  specific aptamers
gggagugguguggagcggag

SEQ ID NO: 4537 - RNA, 20 nt, Artificial sequence
  specific aptamers
gggagugguguggagcggcg

SEQ ID NO: 4538 - RNA, 20 nt, Artificial sequence
  specific aptamers
gggagugguguggagcggug

SEQ ID NO: 4539 - RNA, 20 nt, Artificial sequence
  specific aptamers
gggagugguguggaguggag

SEQ ID NO: 4540 - RNA, 20 nt, Artificial sequence
  specific aptamers
gggagugguguggaguggcg

SEQ ID NO: 4541 - RNA, 20 nt, Artificial sequence
  specific aptamers
gggagugguguggaguggug

SEQ ID NO: 4542 - RNA, 21 nt, Artificial sequence
  specific aptamers
gggaguggugugguagaggag

SEQ ID NO: 4543 - RNA, 21 nt, Artificial sequence
  specific aptamers
gggaguggugugguagaggcg

SEQ ID NO: 4544 - RNA, 21 nt, Artificial sequence
  specific aptamers
gggaguggugugguagaggug

SEQ ID NO: 4545 - RNA, 21 nt, Artificial sequence
  specific aptamers
gggaguggugugguagcggag

SEQ ID NO: 4546 - RNA, 21 nt, Artificial sequence
  specific aptamers
gggaguggugugguagcggcg

SEQ ID NO: 4547 - RNA, 21 nt, Artificial sequence
  specific aptamers
gggaguggugugguagcggug

SEQ ID NO: 4548 - RNA, 21 nt, Artificial sequence
  specific aptamers
gggaguggugugguaguggag

SEQ ID NO: 4549 - RNA, 21 nt, Artificial sequence
  specific aptamers
gggaguggugugguaguggcg

SEQ ID NO: 4550 - RNA, 21 nt, Artificial sequence
  specific aptamers
gggaguggugugguaguggug

SEQ ID NO: 4551 - RNA, 21 nt, Artificial sequence
  specific aptamers
gggaguggugugguugaggag

SEQ ID NO: 4552 - RNA, 21 nt, Artificial sequence
  specific aptamers
gggaguggugugguugaggcg

SEQ ID NO: 4553 - RNA, 21 nt, Artificial sequence
  specific aptamers
gggaguggugugguugaggug

SEQ ID NO: 4554 - RNA, 21 nt, Artificial sequence
  specific aptamers
gggaguggugugguugcggag

SEQ ID NO: 4555 - RNA, 21 nt, Artificial sequence
  specific aptamers
gggaguggugugguugcggcg

SEQ ID NO: 4556 - RNA, 21 nt, Artificial sequence
  specific aptamers
gggaguggugugguugcggug

SEQ ID NO: 4557 - RNA, 21 nt, Artificial sequence
  specific aptamers
gggaguggugugguuguggag

SEQ ID NO: 4558 - RNA, 21 nt, Artificial sequence
  specific aptamers
gggaguggugugguuguggcg

SEQ ID NO: 4559 - RNA, 21 nt, Artificial sequence
  specific aptamers
gggaguggugugguuguggug

SEQ ID NO: 4560 - RNA, 20 nt, Artificial sequence
  specific aptamers
gggagugguguggugaggag

SEQ ID NO: 4561 - RNA, 20 nt, Artificial sequence
  specific aptamers
gggagugguguggugaggcg

SEQ ID NO: 4562 - RNA, 20 nt, Artificial sequence
  specific aptamers
gggagugguguggugaggug

SEQ ID NO: 4563 - RNA, 20 nt, Artificial sequence
  specific aptamers
gggagugguguggugcggag

SEQ ID NO: 4564 - RNA, 20 nt, Artificial sequence
  specific aptamers
gggagugguguggugcggcg

SEQ ID NO: 4565 - RNA, 20 nt, Artificial sequence
  specific aptamers
gggagugguguggugcggug

SEQ ID NO: 4566 - RNA, 20 nt, Artificial sequence
  specific aptamers
gggaguggugugguguggag

SEQ ID NO: 4567 - RNA, 20 nt, Artificial sequence
  specific aptamers
gggaguggugugguguggcg

SEQ ID NO: 4568 - RNA, 20 nt, Artificial sequence
  specific aptamers
gggaguggugugguguggug

SEQ ID NO: 4569 - RNA, 21 nt, Artificial sequence
  specific aptamers
gggugaggagaggaagaggag

SEQ ID NO: 4570 - RNA, 21 nt, Artificial sequence
  specific aptamers
gggugaggagaggaagaggcg

SEQ ID NO: 4571 - RNA, 21 nt, Artificial sequence
  specific aptamers
gggugaggagaggaagaggug

SEQ ID NO: 4572 - RNA, 21 nt, Artificial sequence
  specific aptamers
gggugaggagaggaagcggag

SEQ ID NO: 4573 - RNA, 21 nt, Artificial sequence
  specific aptamers
gggugaggagaggaagcggcg

SEQ ID NO: 4574 - RNA, 21 nt, Artificial sequence
  specific aptamers
gggugaggagaggaagcggug

SEQ ID NO: 4575 - RNA, 21 nt, Artificial sequence
  specific aptamers
gggugaggagaggaaguggag

SEQ ID NO: 4576 - RNA, 21 nt, Artificial sequence
  specific aptamers
gggugaggagaggaaguggcg

SEQ ID NO: 4577 - RNA, 21 nt, Artificial sequence
  specific aptamers
gggugaggagaggaaguggug

SEQ ID NO: 4578 - RNA, 21 nt, Artificial sequence
  specific aptamers
gggugaggagaggaugaggag

SEQ ID NO: 4579 - RNA, 21 nt, Artificial sequence
  specific aptamers
gggugaggagaggaugaggcg

SEQ ID NO: 4580 - RNA, 21 nt, Artificial sequence
  specific aptamers
gggugaggagaggaugaggug

SEQ ID NO: 4581 - RNA, 21 nt, Artificial sequence
  specific aptamers
gggugaggagaggaugcggag

SEQ ID NO: 4582 - RNA, 21 nt, Artificial sequence
  specific aptamers
gggugaggagaggaugcggcg

SEQ ID NO: 4583 - RNA, 21 nt, Artificial sequence
  specific aptamers
gggugaggagaggaugcggug

SEQ ID NO: 4584 - RNA, 21 nt, Artificial sequence
  specific aptamers
gggugaggagaggauguggag

SEQ ID NO: 4585 - RNA, 21 nt, Artificial sequence
  specific aptamers
gggugaggagaggauguggcg

SEQ ID NO: 4586 - RNA, 21 nt, Artificial sequence
  specific aptamers
gggugaggagaggauguggug

SEQ ID NO: 4587 - RNA, 20 nt, Artificial sequence
  specific aptamers
gggugaggagaggagaggag

SEQ ID NO: 4588 - RNA, 20 nt, Artificial sequence
  specific aptamers
gggugaggagaggagaggcg

SEQ ID NO: 4589 - RNA, 20 nt, Artificial sequence
  specific aptamers
gggugaggagaggagaggug

SEQ ID NO: 4590 - RNA, 20 nt, Artificial sequence
  specific aptamers
gggugaggagaggagcggag

SEQ ID NO: 4591 - RNA, 20 nt, Artificial sequence
  specific aptamers
gggugaggagaggagcggcg

SEQ ID NO: 4592 - RNA, 20 nt, Artificial sequence
  specific aptamers
gggugaggagaggagcggug

SEQ ID NO: 4593 - RNA, 20 nt, Artificial sequence
  specific aptamers
gggugaggagaggaguggag

SEQ ID NO: 4594 - RNA, 20 nt, Artificial sequence
  specific aptamers
gggugaggagaggaguggcg

SEQ ID NO: 4595 - RNA, 20 nt, Artificial sequence
  specific aptamers
gggugaggagaggaguggug

SEQ ID NO: 4596 - RNA, 21 nt, Artificial sequence
  specific aptamers
gggugaggagagguagaggag

SEQ ID NO: 4597 - RNA, 21 nt, Artificial sequence
  specific aptamers
gggugaggagagguagaggcg

SEQ ID NO: 4598 - RNA, 21 nt, Artificial sequence
  specific aptamers
gggugaggagagguagaggug

SEQ ID NO: 4599 - RNA, 21 nt, Artificial sequence
  specific aptamers
gggugaggagagguagcggag

SEQ ID NO: 4600 - RNA, 21 nt, Artificial sequence
  specific aptamers
gggugaggagagguagcggcg

SEQ ID NO: 4601 - RNA, 21 nt, Artificial sequence
  specific aptamers
gggugaggagagguagcggug

SEQ ID NO: 4602 - RNA, 21 nt, Artificial sequence
  specific aptamers
gggugaggagagguaguggag

SEQ ID NO: 4603 - RNA, 21 nt, Artificial sequence
  specific aptamers
gggugaggagagguaguggcg

SEQ ID NO: 4604 - RNA, 21 nt, Artificial sequence
  specific aptamers
gggugaggagagguaguggug

SEQ ID NO: 4605 - RNA, 21 nt, Artificial sequence
  specific aptamers
gggugaggagagguugaggag

SEQ ID NO: 4606 - RNA, 21 nt, Artificial sequence
  specific aptamers
gggugaggagagguugaggcg

SEQ ID NO: 4607 - RNA, 21 nt, Artificial sequence
  specific aptamers
gggugaggagagguugaggug

SEQ ID NO: 4608 - RNA, 21 nt, Artificial sequence
  specific aptamers
gggugaggagagguugcggag

SEQ ID NO: 4609 - RNA, 21 nt, Artificial sequence
  specific aptamers
gggugaggagagguugcggcg

SEQ ID NO: 4610 - RNA, 21 nt, Artificial sequence
  specific aptamers
gggugaggagagguugcggug

SEQ ID NO: 4611 - RNA, 21 nt, Artificial sequence
  specific aptamers
gggugaggagagguuguggag

SEQ ID NO: 4612 - RNA, 21 nt, Artificial sequence
  specific aptamers
gggugaggagagguuguggcg

SEQ ID NO: 4613 - RNA, 21 nt, Artificial sequence
  specific aptamers
gggugaggagagguuguggug

SEQ ID NO: 4614 - RNA, 20 nt, Artificial sequence
  specific aptamers
gggugaggagaggugaggag

SEQ ID NO: 4615 - RNA, 20 nt, Artificial sequence
  specific aptamers
gggugaggagaggugaggcg

SEQ ID NO: 4616 - RNA, 20 nt, Artificial sequence
  specific aptamers
gggugaggagaggugaggug

SEQ ID NO: 4617 - RNA, 20 nt, Artificial sequence
  specific aptamers
gggugaggagaggugcggag

SEQ ID NO: 4618 - RNA, 20 nt, Artificial sequence
  specific aptamers
gggugaggagaggugcggcg

SEQ ID NO: 4619 - RNA, 20 nt, Artificial sequence
  specific aptamers
gggugaggagaggugcggug

SEQ ID NO: 4620 - RNA, 20 nt, Artificial sequence
  specific aptamers
gggugaggagagguguggag

SEQ ID NO: 4621 - RNA, 20 nt, Artificial sequence
  specific aptamers
gggugaggagagguguggcg

SEQ ID NO: 4622 - RNA, 20 nt, Artificial sequence
  specific aptamers
gggugaggagagguguggug

SEQ ID NO: 4623 - RNA, 21 nt, Artificial sequence
  specific aptamers
gggugaggaguggaagaggag

SEQ ID NO: 4624 - RNA, 21 nt, Artificial sequence
  specific aptamers
gggugaggaguggaagaggcg

SEQ ID NO: 4625 - RNA, 21 nt, Artificial sequence
  specific aptamers
gggugaggaguggaagaggug

SEQ ID NO: 4626 - RNA, 21 nt, Artificial sequence
  specific aptamers
gggugaggaguggaagcggag

SEQ ID NO: 4627 - RNA, 21 nt, Artificial sequence
  specific aptamers
gggugaggaguggaagcggcg

SEQ ID NO: 4628 - RNA, 21 nt, Artificial sequence
  specific aptamers
gggugaggaguggaagcggug

SEQ ID NO: 4629 - RNA, 21 nt, Artificial sequence
  specific aptamers
gggugaggaguggaaguggag

SEQ ID NO: 4630 - RNA, 21 nt, Artificial sequence
  specific aptamers
gggugaggaguggaaguggcg

SEQ ID NO: 4631 - RNA, 21 nt, Artificial sequence
  specific aptamers
gggugaggaguggaaguggug

SEQ ID NO: 4632 - RNA, 21 nt, Artificial sequence
  specific aptamers
gggugaggaguggaugaggag

SEQ ID NO: 4633 - RNA, 21 nt, Artificial sequence
  specific aptamers
gggugaggaguggaugaggcg

SEQ ID NO: 4634 - RNA, 21 nt, Artificial sequence
  specific aptamers
gggugaggaguggaugaggug

SEQ ID NO: 4635 - RNA, 21 nt, Artificial sequence
  specific aptamers
gggugaggaguggaugcggag

SEQ ID NO: 4636 - RNA, 21 nt, Artificial sequence
  specific aptamers
gggugaggaguggaugcggcg

SEQ ID NO: 4637 - RNA, 21 nt, Artificial sequence
  specific aptamers
gggugaggaguggaugcggug

SEQ ID NO: 4638 - RNA, 21 nt, Artificial sequence
  specific aptamers
gggugaggaguggauguggag

SEQ ID NO: 4639 - RNA, 21 nt, Artificial sequence
  specific aptamers
gggugaggaguggauguggcg

SEQ ID NO: 4640 - RNA, 21 nt, Artificial sequence
  specific aptamers
gggugaggaguggauguggug

SEQ ID NO: 4641 - RNA, 20 nt, Artificial sequence
  specific aptamers
gggugaggaguggagaggag

SEQ ID NO: 4642 - RNA, 20 nt, Artificial sequence
  specific aptamers
gggugaggaguggagaggcg

SEQ ID NO: 4643 - RNA, 20 nt, Artificial sequence
  specific aptamers
gggugaggaguggagaggug

SEQ ID NO: 4644 - RNA, 20 nt, Artificial sequence
  specific aptamers
gggugaggaguggagcggag

SEQ ID NO: 4645 - RNA, 20 nt, Artificial sequence
  specific aptamers
gggugaggaguggagcggcg

SEQ ID NO: 4646 - RNA, 20 nt, Artificial sequence
  specific aptamers
gggugaggaguggagcggug

SEQ ID NO: 4647 - RNA, 20 nt, Artificial sequence
  specific aptamers
gggugaggaguggaguggag

SEQ ID NO: 4648 - RNA, 20 nt, Artificial sequence
  specific aptamers
gggugaggaguggaguggcg

SEQ ID NO: 4649 - RNA, 20 nt, Artificial sequence
  specific aptamers
gggugaggaguggaguggug

SEQ ID NO: 4650 - RNA, 21 nt, Artificial sequence
  specific aptamers
gggugaggagugguagaggag

SEQ ID NO: 4651 - RNA, 21 nt, Artificial sequence
  specific aptamers
gggugaggagugguagaggcg

SEQ ID NO: 4652 - RNA, 21 nt, Artificial sequence
  specific aptamers
gggugaggagugguagaggug

SEQ ID NO: 4653 - RNA, 21 nt, Artificial sequence
  specific aptamers
gggugaggagugguagcggag

SEQ ID NO: 4654 - RNA, 21 nt, Artificial sequence
  specific aptamers
gggugaggagugguagcggcg

SEQ ID NO: 4655 - RNA, 21 nt, Artificial sequence
  specific aptamers
gggugaggagugguagcggug

SEQ ID NO: 4656 - RNA, 21 nt, Artificial sequence
  specific aptamers
gggugaggagugguaguggag

SEQ ID NO: 4657 - RNA, 21 nt, Artificial sequence
  specific aptamers
gggugaggagugguaguggcg

SEQ ID NO: 4658 - RNA, 21 nt, Artificial sequence
  specific aptamers
gggugaggagugguaguggug

SEQ ID NO: 4659 - RNA, 21 nt, Artificial sequence
  specific aptamers
gggugaggagugguugaggag

SEQ ID NO: 4660 - RNA, 21 nt, Artificial sequence
  specific aptamers
gggugaggagugguugaggcg

SEQ ID NO: 4661 - RNA, 21 nt, Artificial sequence
  specific aptamers
gggugaggagugguugaggug

SEQ ID NO: 4662 - RNA, 21 nt, Artificial sequence
  specific aptamers
gggugaggagugguugcggag

SEQ ID NO: 4663 - RNA, 21 nt, Artificial sequence
  specific aptamers
gggugaggagugguugcggcg

SEQ ID NO: 4664 - RNA, 21 nt, Artificial sequence
  specific aptamers
gggugaggagugguugcggug

SEQ ID NO: 4665 - RNA, 21 nt, Artificial sequence
  specific aptamers
gggugaggagugguuguggag

SEQ ID NO: 4666 - RNA, 21 nt, Artificial sequence
  specific aptamers
gggugaggagugguuguggcg

SEQ ID NO: 4667 - RNA, 21 nt, Artificial sequence
  specific aptamers
gggugaggagugguuguggug

SEQ ID NO: 4668 - RNA, 20 nt, Artificial sequence
  specific aptamers
gggugaggaguggugaggag

SEQ ID NO: 4669 - RNA, 20 nt, Artificial sequence
  specific aptamers
gggugaggaguggugaggcg

SEQ ID NO: 4670 - RNA, 20 nt, Artificial sequence
  specific aptamers
gggugaggaguggugaggug

SEQ ID NO: 4671 - RNA, 20 nt, Artificial sequence
  specific aptamers
gggugaggaguggugcggag

SEQ ID NO: 4672 - RNA, 20 nt, Artificial sequence
  specific aptamers
gggugaggaguggugcggcg

SEQ ID NO: 4673 - RNA, 20 nt, Artificial sequence
  specific aptamers
gggugaggaguggugcggug

SEQ ID NO: 4674 - RNA, 20 nt, Artificial sequence
  specific aptamers
gggugaggagugguguggag

SEQ ID NO: 4675 - RNA, 20 nt, Artificial sequence
  specific aptamers
gggugaggagugguguggcg

SEQ ID NO: 4676 - RNA, 20 nt, Artificial sequence
  specific aptamers
gggugaggagugguguggug

SEQ ID NO: 4677 - RNA, 21 nt, Artificial sequence
  specific aptamers
gggugaggugaggaagaggag

SEQ ID NO: 4678 - RNA, 21 nt, Artificial sequence
  specific aptamers
gggugaggugaggaagaggcg

SEQ ID NO: 4679 - RNA, 21 nt, Artificial sequence
  specific aptamers
gggugaggugaggaagaggug

SEQ ID NO: 4680 - RNA, 21 nt, Artificial sequence
  specific aptamers
gggugaggugaggaagcggag

SEQ ID NO: 4681 - RNA, 21 nt, Artificial sequence
  specific aptamers
gggugaggugaggaagcggcg

SEQ ID NO: 4682 - RNA, 21 nt, Artificial sequence
  specific aptamers
gggugaggugaggaagcggug

SEQ ID NO: 4683 - RNA, 21 nt, Artificial sequence
  specific aptamers
gggugaggugaggaaguggag

SEQ ID NO: 4684 - RNA, 21 nt, Artificial sequence
  specific aptamers
gggugaggugaggaaguggcg

SEQ ID NO: 4685 - RNA, 21 nt, Artificial sequence
  specific aptamers
gggugaggugaggaaguggug

SEQ ID NO: 4686 - RNA, 21 nt, Artificial sequence
  specific aptamers
gggugaggugaggaugaggag

SEQ ID NO: 4687 - RNA, 21 nt, Artificial sequence
  specific aptamers
gggugaggugaggaugaggcg

SEQ ID NO: 4688 - RNA, 21 nt, Artificial sequence
  specific aptamers
gggugaggugaggaugaggug

SEQ ID NO: 4689 - RNA, 21 nt, Artificial sequence
  specific aptamers
gggugaggugaggaugcggag

SEQ ID NO: 4690 - RNA, 21 nt, Artificial sequence
  specific aptamers
gggugaggugaggaugcggcg

SEQ ID NO: 4691 - RNA, 21 nt, Artificial sequence
  specific aptamers
gggugaggugaggaugcggug

SEQ ID NO: 4692 - RNA, 21 nt, Artificial sequence
  specific aptamers
gggugaggugaggauguggag

SEQ ID NO: 4693 - RNA, 21 nt, Artificial sequence
  specific aptamers
gggugaggugaggauguggcg

SEQ ID NO: 4694 - RNA, 21 nt, Artificial sequence
  specific aptamers
gggugaggugaggauguggug

SEQ ID NO: 4695 - RNA, 20 nt, Artificial sequence
  specific aptamers
gggugaggugaggagaggag

SEQ ID NO: 4696 - RNA, 20 nt, Artificial sequence
  specific aptamers
gggugaggugaggagaggcg

SEQ ID NO: 4697 - RNA, 20 nt, Artificial sequence
  specific aptamers
gggugaggugaggagaggug

SEQ ID NO: 4698 - RNA, 20 nt, Artificial sequence
  specific aptamers
gggugaggugaggagcggag

SEQ ID NO: 4699 - RNA, 20 nt, Artificial sequence
  specific aptamers
gggugaggugaggagcggcg

SEQ ID NO: 4700 - RNA, 20 nt, Artificial sequence
  specific aptamers
gggugaggugaggagcggug

SEQ ID NO: 4701 - RNA, 20 nt, Artificial sequence
  specific aptamers
gggugaggugaggaguggag

SEQ ID NO: 4702 - RNA, 20 nt, Artificial sequence
  specific aptamers
gggugaggugaggaguggcg

SEQ ID NO: 4703 - RNA, 20 nt, Artificial sequence
  specific aptamers
gggugaggugaggaguggug

SEQ ID NO: 4704 - RNA, 21 nt, Artificial sequence
  specific aptamers
gggugaggugagguagaggag

SEQ ID NO: 4705 - RNA, 21 nt, Artificial sequence
  specific aptamers
gggugaggugagguagaggcg

SEQ ID NO: 4706 - RNA, 21 nt, Artificial sequence
  specific aptamers
gggugaggugagguagaggug

SEQ ID NO: 4707 - RNA, 21 nt, Artificial sequence
  specific aptamers
gggugaggugagguagcggag

SEQ ID NO: 4708 - RNA, 21 nt, Artificial sequence
  specific aptamers
gggugaggugagguagcggcg

SEQ ID NO: 4709 - RNA, 21 nt, Artificial sequence
  specific aptamers
gggugaggugagguagcggug

SEQ ID NO: 4710 - RNA, 21 nt, Artificial sequence
  specific aptamers
gggugaggugagguaguggag

SEQ ID NO: 4711 - RNA, 21 nt, Artificial sequence
  specific aptamers
gggugaggugagguaguggcg

SEQ ID NO: 4712 - RNA, 21 nt, Artificial sequence
  specific aptamers
gggugaggugagguaguggug

SEQ ID NO: 4713 - RNA, 21 nt, Artificial sequence
  specific aptamers
gggugaggugagguugaggag

SEQ ID NO: 4714 - RNA, 21 nt, Artificial sequence
  specific aptamers
gggugaggugagguugaggcg

SEQ ID NO: 4715 - RNA, 21 nt, Artificial sequence
  specific aptamers
gggugaggugagguugaggug

SEQ ID NO: 4716 - RNA, 21 nt, Artificial sequence
  specific aptamers
gggugaggugagguugcggag

SEQ ID NO: 4717 - RNA, 21 nt, Artificial sequence
  specific aptamers
gggugaggugagguugcggcg

SEQ ID NO: 4718 - RNA, 21 nt, Artificial sequence
  specific aptamers
gggugaggugagguugcggug

SEQ ID NO: 4719 - RNA, 21 nt, Artificial sequence
  specific aptamers
gggugaggugagguuguggag

SEQ ID NO: 4720 - RNA, 21 nt, Artificial sequence
  specific aptamers
gggugaggugagguuguggcg

SEQ ID NO: 4721 - RNA, 21 nt, Artificial sequence
  specific aptamers
gggugaggugagguuguggug

SEQ ID NO: 4722 - RNA, 20 nt, Artificial sequence
  specific aptamers
gggugaggugaggugaggag

SEQ ID NO: 4723 - RNA, 20 nt, Artificial sequence
  specific aptamers
gggugaggugaggugaggcg

SEQ ID NO: 4724 - RNA, 20 nt, Artificial sequence
  specific aptamers
gggugaggugaggugaggug

SEQ ID NO: 4725 - RNA, 20 nt, Artificial sequence
  specific aptamers
gggugaggugaggugcggag

SEQ ID NO: 4726 - RNA, 20 nt, Artificial sequence
  specific aptamers
gggugaggugaggugcggcg

SEQ ID NO: 4727 - RNA, 20 nt, Artificial sequence
  specific aptamers
gggugaggugaggugcggug

SEQ ID NO: 4728 - RNA, 20 nt, Artificial sequence
  specific aptamers
gggugaggugagguguggag

SEQ ID NO: 4729 - RNA, 20 nt, Artificial sequence
  specific aptamers
gggugaggugagguguggcg

SEQ ID NO: 4730 - RNA, 20 nt, Artificial sequence
  specific aptamers
gggugaggugagguguggug

SEQ ID NO: 4731 - RNA, 21 nt, Artificial sequence
  specific aptamers
gggugagguguggaagaggag

SEQ ID NO: 4732 - RNA, 21 nt, Artificial sequence
  specific aptamers
gggugagguguggaagaggcg

SEQ ID NO: 4733 - RNA, 21 nt, Artificial sequence
  specific aptamers
gggugagguguggaagaggug

SEQ ID NO: 4734 - RNA, 21 nt, Artificial sequence
  specific aptamers
gggugagguguggaagcggag

SEQ ID NO: 4735 - RNA, 21 nt, Artificial sequence
  specific aptamers
gggugagguguggaagcggcg

SEQ ID NO: 4736 - RNA, 21 nt, Artificial sequence
  specific aptamers
gggugagguguggaagcggug

SEQ ID NO: 4737 - RNA, 21 nt, Artificial sequence
  specific aptamers
gggugagguguggaaguggag

SEQ ID NO: 4738 - RNA, 21 nt, Artificial sequence
  specific aptamers
gggugagguguggaaguggcg

SEQ ID NO: 4739 - RNA, 21 nt, Artificial sequence
  specific aptamers
gggugagguguggaaguggug

SEQ ID NO: 4740 - RNA, 21 nt, Artificial sequence
  specific aptamers
gggugagguguggaugaggag

SEQ ID NO: 4741 - RNA, 21 nt, Artificial sequence
  specific aptamers
gggugagguguggaugaggcg

SEQ ID NO: 4742 - RNA, 21 nt, Artificial sequence
  specific aptamers
gggugagguguggaugaggug

SEQ ID NO: 4743 - RNA, 21 nt, Artificial sequence
  specific aptamers
gggugagguguggaugcggag

SEQ ID NO: 4744 - RNA, 21 nt, Artificial sequence
  specific aptamers
gggugagguguggaugcggcg

SEQ ID NO: 4745 - RNA, 21 nt, Artificial sequence
  specific aptamers
gggugagguguggaugcggug

SEQ ID NO: 4746 - RNA, 21 nt, Artificial sequence
  specific aptamers
gggugagguguggauguggag

SEQ ID NO: 4747 - RNA, 21 nt, Artificial sequence
  specific aptamers
gggugagguguggauguggcg

SEQ ID NO: 4748 - RNA, 21 nt, Artificial sequence
  specific aptamers
gggugagguguggauguggug

SEQ ID NO: 4749 - RNA, 20 nt, Artificial sequence
  specific aptamers
gggugagguguggagaggag

SEQ ID NO: 4750 - RNA, 20 nt, Artificial sequence
  specific aptamers
gggugagguguggagaggcg

SEQ ID NO: 4751 - RNA, 20 nt, Artificial sequence
  specific aptamers
gggugagguguggagaggug

SEQ ID NO: 4752 - RNA, 20 nt, Artificial sequence
  specific aptamers
gggugagguguggagcggag

SEQ ID NO: 4753 - RNA, 20 nt, Artificial sequence
  specific aptamers
gggugagguguggagcggcg

SEQ ID NO: 4754 - RNA, 20 nt, Artificial sequence
  specific aptamers
gggugagguguggagcggug

SEQ ID NO: 4755 - RNA, 20 nt, Artificial sequence
  specific aptamers
gggugagguguggaguggag

SEQ ID NO: 4756 - RNA, 20 nt, Artificial sequence
  specific aptamers
gggugagguguggaguggcg

SEQ ID NO: 4757 - RNA, 20 nt, Artificial sequence
  specific aptamers
gggugagguguggaguggug

SEQ ID NO: 4758 - RNA, 21 nt, Artificial sequence
  specific aptamers
gggugaggugugguagaggag

SEQ ID NO: 4759 - RNA, 21 nt, Artificial sequence
  specific aptamers
gggugaggugugguagaggcg

SEQ ID NO: 4760 - RNA, 21 nt, Artificial sequence
  specific aptamers
gggugaggugugguagaggug

SEQ ID NO: 4761 - RNA, 21 nt, Artificial sequence
  specific aptamers
gggugaggugugguagcggag

SEQ ID NO: 4762 - RNA, 21 nt, Artificial sequence
  specific aptamers
gggugaggugugguagcggcg

SEQ ID NO: 4763 - RNA, 21 nt, Artificial sequence
  specific aptamers
gggugaggugugguagcggug

SEQ ID NO: 4764 - RNA, 21 nt, Artificial sequence
  specific aptamers
gggugaggugugguaguggag

SEQ ID NO: 4765 - RNA, 21 nt, Artificial sequence
  specific aptamers
gggugaggugugguaguggcg

SEQ ID NO: 4766 - RNA, 21 nt, Artificial sequence
  specific aptamers
gggugaggugugguaguggug

SEQ ID NO: 4767 - RNA, 21 nt, Artificial sequence
  specific aptamers
gggugaggugugguugaggag

SEQ ID NO: 4768 - RNA, 21 nt, Artificial sequence
  specific aptamers
gggugaggugugguugaggcg

SEQ ID NO: 4769 - RNA, 21 nt, Artificial sequence
  specific aptamers
gggugaggugugguugaggug

SEQ ID NO: 4770 - RNA, 21 nt, Artificial sequence
  specific aptamers
gggugaggugugguugcggag

SEQ ID NO: 4771 - RNA, 21 nt, Artificial sequence
  specific aptamers
gggugaggugugguugcggcg

SEQ ID NO: 4772 - RNA, 21 nt, Artificial sequence
  specific aptamers
gggugaggugugguugcggug

SEQ ID NO: 4773 - RNA, 21 nt, Artificial sequence
  specific aptamers
gggugaggugugguuguggag

SEQ ID NO: 4774 - RNA, 21 nt, Artificial sequence
  specific aptamers
gggugaggugugguuguggcg

SEQ ID NO: 4775 - RNA, 21 nt, Artificial sequence
  specific aptamers
gggugaggugugguuguggug

SEQ ID NO: 4776 - RNA, 20 nt, Artificial sequence
  specific aptamers
gggugagguguggugaggag

SEQ ID NO: 4777 - RNA, 20 nt, Artificial sequence
  specific aptamers
gggugagguguggugaggcg

SEQ ID NO: 4778 - RNA, 20 nt, Artificial sequence
  specific aptamers
gggugagguguggugaggug

SEQ ID NO: 4779 - RNA, 20 nt, Artificial sequence
  specific aptamers
gggugagguguggugcggag

SEQ ID NO: 4780 - RNA, 20 nt, Artificial sequence
  specific aptamers
gggugagguguggugcggcg

SEQ ID NO: 4781 - RNA, 20 nt, Artificial sequence
  specific aptamers
gggugagguguggugcggug

SEQ ID NO: 4782 - RNA, 20 nt, Artificial sequence
  specific aptamers
gggugaggugugguguggag

SEQ ID NO: 4783 - RNA, 20 nt, Artificial sequence
  specific aptamers
gggugaggugugguguggcg

SEQ ID NO: 4784 - RNA, 20 nt, Artificial sequence
  specific aptamers
gggugaggugugguguggug

SEQ ID NO: 4785 - RNA, 21 nt, Artificial sequence
  specific aptamers
ggguguggagaggaagaggag

SEQ ID NO: 4786 - RNA, 21 nt, Artificial sequence
  specific aptamers
ggguguggagaggaagaggcg

SEQ ID NO: 4787 - RNA, 21 nt, Artificial sequence
  specific aptamers
ggguguggagaggaagaggug

SEQ ID NO: 4788 - RNA, 21 nt, Artificial sequence
  specific aptamers
ggguguggagaggaagcggag

SEQ ID NO: 4789 - RNA, 21 nt, Artificial sequence
  specific aptamers
ggguguggagaggaagcggcg

SEQ ID NO: 4790 - RNA, 21 nt, Artificial sequence
  specific aptamers
ggguguggagaggaagcggug

SEQ ID NO: 4791 - RNA, 21 nt, Artificial sequence
  specific aptamers
ggguguggagaggaaguggag

SEQ ID NO: 4792 - RNA, 21 nt, Artificial sequence
  specific aptamers
ggguguggagaggaaguggcg

SEQ ID NO: 4793 - RNA, 21 nt, Artificial sequence
  specific aptamers
ggguguggagaggaaguggug

SEQ ID NO: 4794 - RNA, 21 nt, Artificial sequence
  specific aptamers
ggguguggagaggaugaggag

SEQ ID NO: 4795 - RNA, 21 nt, Artificial sequence
  specific aptamers
ggguguggagaggaugaggcg

SEQ ID NO: 4796 - RNA, 21 nt, Artificial sequence
  specific aptamers
ggguguggagaggaugaggug

SEQ ID NO: 4797 - RNA, 21 nt, Artificial sequence
  specific aptamers
ggguguggagaggaugcggag

SEQ ID NO: 4798 - RNA, 21 nt, Artificial sequence
  specific aptamers
ggguguggagaggaugcggcg

SEQ ID NO: 4799 - RNA, 21 nt, Artificial sequence
  specific aptamers
ggguguggagaggaugcggug

SEQ ID NO: 4800 - RNA, 21 nt, Artificial sequence
  specific aptamers
ggguguggagaggauguggag

SEQ ID NO: 4801 - RNA, 21 nt, Artificial sequence
  specific aptamers
ggguguggagaggauguggcg

SEQ ID NO: 4802 - RNA, 21 nt, Artificial sequence
  specific aptamers
ggguguggagaggauguggug

SEQ ID NO: 4803 - RNA, 20 nt, Artificial sequence
  specific aptamers
ggguguggagaggagaggag

SEQ ID NO: 4804 - RNA, 20 nt, Artificial sequence
  specific aptamers
ggguguggagaggagaggcg

SEQ ID NO: 4805 - RNA, 20 nt, Artificial sequence
  specific aptamers
ggguguggagaggagaggug

SEQ ID NO: 4806 - RNA, 20 nt, Artificial sequence
  specific aptamers
ggguguggagaggagcggag

SEQ ID NO: 4807 - RNA, 20 nt, Artificial sequence
  specific aptamers
ggguguggagaggagcggcg

SEQ ID NO: 4808 - RNA, 20 nt, Artificial sequence
  specific aptamers
ggguguggagaggagcggug

SEQ ID NO: 4809 - RNA, 20 nt, Artificial sequence
  specific aptamers
ggguguggagaggaguggag

SEQ ID NO: 4810 - RNA, 20 nt, Artificial sequence
  specific aptamers
ggguguggagaggaguggcg

SEQ ID NO: 4811 - RNA, 20 nt, Artificial sequence
  specific aptamers
ggguguggagaggaguggug

SEQ ID NO: 4812 - RNA, 21 nt, Artificial sequence
  specific aptamers
ggguguggagagguagaggag

SEQ ID NO: 4813 - RNA, 21 nt, Artificial sequence
  specific aptamers
ggguguggagagguagaggcg

SEQ ID NO: 4814 - RNA, 21 nt, Artificial sequence
  specific aptamers
ggguguggagagguagaggug

SEQ ID NO: 4815 - RNA, 21 nt, Artificial sequence
  specific aptamers
ggguguggagagguagcggag

SEQ ID NO: 4816 - RNA, 21 nt, Artificial sequence
  specific aptamers
ggguguggagagguagcggcg

SEQ ID NO: 4817 - RNA, 21 nt, Artificial sequence
  specific aptamers
ggguguggagagguagcggug

SEQ ID NO: 4818 - RNA, 21 nt, Artificial sequence
  specific aptamers
ggguguggagagguaguggag

SEQ ID NO: 4819 - RNA, 21 nt, Artificial sequence
  specific aptamers
ggguguggagagguaguggcg

SEQ ID NO: 4820 - RNA, 21 nt, Artificial sequence
  specific aptamers
ggguguggagagguaguggug

SEQ ID NO: 4821 - RNA, 21 nt, Artificial sequence
  specific aptamers
ggguguggagagguugaggag

SEQ ID NO: 4822 - RNA, 21 nt, Artificial sequence
  specific aptamers
ggguguggagagguugaggcg

SEQ ID NO: 4823 - RNA, 21 nt, Artificial sequence
  specific aptamers
ggguguggagagguugaggug

SEQ ID NO: 4824 - RNA, 21 nt, Artificial sequence
  specific aptamers
ggguguggagagguugcggag

SEQ ID NO: 4825 - RNA, 21 nt, Artificial sequence
  specific aptamers
ggguguggagagguugcggcg

SEQ ID NO: 4826 - RNA, 21 nt, Artificial sequence
  specific aptamers
ggguguggagagguugcggug

SEQ ID NO: 4827 - RNA, 21 nt, Artificial sequence
  specific aptamers
ggguguggagagguuguggag

SEQ ID NO: 4828 - RNA, 21 nt, Artificial sequence
  specific aptamers
ggguguggagagguuguggcg

SEQ ID NO: 4829 - RNA, 21 nt, Artificial sequence
  specific aptamers
ggguguggagagguuguggug

SEQ ID NO: 4830 - RNA, 20 nt, Artificial sequence
  specific aptamers
ggguguggagaggugaggag

SEQ ID NO: 4831 - RNA, 20 nt, Artificial sequence
  specific aptamers
ggguguggagaggugaggcg

SEQ ID NO: 4832 - RNA, 20 nt, Artificial sequence
  specific aptamers
ggguguggagaggugaggug

SEQ ID NO: 4833 - RNA, 20 nt, Artificial sequence
  specific aptamers
ggguguggagaggugcggag

SEQ ID NO: 4834 - RNA, 20 nt, Artificial sequence
  specific aptamers
ggguguggagaggugcggcg

SEQ ID NO: 4835 - RNA, 20 nt, Artificial sequence
  specific aptamers
ggguguggagaggugcggug

SEQ ID NO: 4836 - RNA, 20 nt, Artificial sequence
  specific aptamers
ggguguggagagguguggag

SEQ ID NO: 4837 - RNA, 20 nt, Artificial sequence
  specific aptamers
ggguguggagagguguggcg

SEQ ID NO: 4838 - RNA, 20 nt, Artificial sequence
  specific aptamers
ggguguggagagguguggug

SEQ ID NO: 4839 - RNA, 21 nt, Artificial sequence
  specific aptamers
ggguguggaguggaagaggag

SEQ ID NO: 4840 - RNA, 21 nt, Artificial sequence
  specific aptamers
ggguguggaguggaagaggcg

SEQ ID NO: 4841 - RNA, 21 nt, Artificial sequence
  specific aptamers
ggguguggaguggaagaggug

SEQ ID NO: 4842 - RNA, 21 nt, Artificial sequence
  specific aptamers
ggguguggaguggaagcggag

SEQ ID NO: 4843 - RNA, 21 nt, Artificial sequence
  specific aptamers
ggguguggaguggaagcggcg

SEQ ID NO: 4844 - RNA, 21 nt, Artificial sequence
  specific aptamers
ggguguggaguggaagcggug

SEQ ID NO: 4845 - RNA, 21 nt, Artificial sequence
  specific aptamers
ggguguggaguggaaguggag

SEQ ID NO: 4846 - RNA, 21 nt, Artificial sequence
  specific aptamers
ggguguggaguggaaguggcg

SEQ ID NO: 4847 - RNA, 21 nt, Artificial sequence
  specific aptamers
ggguguggaguggaaguggug

SEQ ID NO: 4848 - RNA, 21 nt, Artificial sequence
  specific aptamers
ggguguggaguggaugaggag

SEQ ID NO: 4849 - RNA, 21 nt, Artificial sequence
  specific aptamers
ggguguggaguggaugaggcg

SEQ ID NO: 4850 - RNA, 21 nt, Artificial sequence
  specific aptamers
ggguguggaguggaugaggug

SEQ ID NO: 4851 - RNA, 21 nt, Artificial sequence
  specific aptamers
ggguguggaguggaugcggag

SEQ ID NO: 4852 - RNA, 21 nt, Artificial sequence
  specific aptamers
ggguguggaguggaugcggcg

SEQ ID NO: 4853 - RNA, 21 nt, Artificial sequence
  specific aptamers
ggguguggaguggaugcggug

SEQ ID NO: 4854 - RNA, 21 nt, Artificial sequence
  specific aptamers
ggguguggaguggauguggag

SEQ ID NO: 4855 - RNA, 21 nt, Artificial sequence
  specific aptamers
ggguguggaguggauguggcg

SEQ ID NO: 4856 - RNA, 21 nt, Artificial sequence
  specific aptamers
ggguguggaguggauguggug

SEQ ID NO: 4857 - RNA, 20 nt, Artificial sequence
  specific aptamers
ggguguggaguggagaggag

SEQ ID NO: 4858 - RNA, 20 nt, Artificial sequence
  specific aptamers
ggguguggaguggagaggcg

SEQ ID NO: 4859 - RNA, 20 nt, Artificial sequence
  specific aptamers
ggguguggaguggagaggug

SEQ ID NO: 4860 - RNA, 20 nt, Artificial sequence
  specific aptamers
ggguguggaguggagcggag

SEQ ID NO: 4861 - RNA, 20 nt, Artificial sequence
  specific aptamers
ggguguggaguggagcggcg

SEQ ID NO: 4862 - RNA, 20 nt, Artificial sequence
  specific aptamers
ggguguggaguggagcggug

SEQ ID NO: 4863 - RNA, 20 nt, Artificial sequence
  specific aptamers
ggguguggaguggaguggag

SEQ ID NO: 4864 - RNA, 20 nt, Artificial sequence
  specific aptamers
ggguguggaguggaguggcg

SEQ ID NO: 4865 - RNA, 20 nt, Artificial sequence
  specific aptamers
ggguguggaguggaguggug

SEQ ID NO: 4866 - RNA, 21 nt, Artificial sequence
  specific aptamers
ggguguggagugguagaggag

SEQ ID NO: 4867 - RNA, 21 nt, Artificial sequence
  specific aptamers
ggguguggagugguagaggcg

SEQ ID NO: 4868 - RNA, 21 nt, Artificial sequence
  specific aptamers
ggguguggagugguagaggug

SEQ ID NO: 4869 - RNA, 21 nt, Artificial sequence
  specific aptamers
ggguguggagugguagcggag

SEQ ID NO: 4870 - RNA, 21 nt, Artificial sequence
  specific aptamers
ggguguggagugguagcggcg

SEQ ID NO: 4871 - RNA, 21 nt, Artificial sequence
  specific aptamers
ggguguggagugguagcggug

SEQ ID NO: 4872 - RNA, 21 nt, Artificial sequence
  specific aptamers
ggguguggagugguaguggag

SEQ ID NO: 4873 - RNA, 21 nt, Artificial sequence
  specific aptamers
ggguguggagugguaguggcg

SEQ ID NO: 4874 - RNA, 21 nt, Artificial sequence
  specific aptamers
ggguguggagugguaguggug

SEQ ID NO: 4875 - RNA, 21 nt, Artificial sequence
  specific aptamers
ggguguggagugguugaggag

SEQ ID NO: 4876 - RNA, 21 nt, Artificial sequence
  specific aptamers
ggguguggagugguugaggcg

SEQ ID NO: 4877 - RNA, 21 nt, Artificial sequence
  specific aptamers
ggguguggagugguugaggug

SEQ ID NO: 4878 - RNA, 21 nt, Artificial sequence
  specific aptamers
ggguguggagugguugcggag

SEQ ID NO: 4879 - RNA, 21 nt, Artificial sequence
  specific aptamers
ggguguggagugguugcggcg

SEQ ID NO: 4880 - RNA, 21 nt, Artificial sequence
  specific aptamers
ggguguggagugguugcggug

SEQ ID NO: 4881 - RNA, 21 nt, Artificial sequence
  specific aptamers
ggguguggagugguuguggag

SEQ ID NO: 4882 - RNA, 21 nt, Artificial sequence
  specific aptamers
ggguguggagugguuguggcg

SEQ ID NO: 4883 - RNA, 21 nt, Artificial sequence
  specific aptamers
ggguguggagugguuguggug

SEQ ID NO: 4884 - RNA, 20 nt, Artificial sequence
  specific aptamers
ggguguggaguggugaggag

SEQ ID NO: 4885 - RNA, 20 nt, Artificial sequence
  specific aptamers
ggguguggaguggugaggcg

SEQ ID NO: 4886 - RNA, 20 nt, Artificial sequence
  specific aptamers
ggguguggaguggugaggug

SEQ ID NO: 4887 - RNA, 20 nt, Artificial sequence
  specific aptamers
ggguguggaguggugcggag

SEQ ID NO: 4888 - RNA, 20 nt, Artificial sequence
  specific aptamers
ggguguggaguggugcggcg

SEQ ID NO: 4889 - RNA, 20 nt, Artificial sequence
  specific aptamers
ggguguggaguggugcggug

SEQ ID NO: 4890 - RNA, 20 nt, Artificial sequence
  specific aptamers
ggguguggagugguguggag

SEQ ID NO: 4891 - RNA, 20 nt, Artificial sequence
  specific aptamers
ggguguggagugguguggcg

SEQ ID NO: 4892 - RNA, 20 nt, Artificial sequence
  specific aptamers
ggguguggagugguguggug

SEQ ID NO: 4893 - RNA, 21 nt, Artificial sequence
  specific aptamers
ggguguggugaggaagaggag

SEQ ID NO: 4894 - RNA, 21 nt, Artificial sequence
  specific aptamers
ggguguggugaggaagaggcg

SEQ ID NO: 4895 - RNA, 21 nt, Artificial sequence
  specific aptamers
ggguguggugaggaagaggug

SEQ ID NO: 4896 - RNA, 21 nt, Artificial sequence
  specific aptamers
ggguguggugaggaagcggag

SEQ ID NO: 4897 - RNA, 21 nt, Artificial sequence
  specific aptamers
ggguguggugaggaagcggcg

SEQ ID NO: 4898 - RNA, 21 nt, Artificial sequence
  specific aptamers
ggguguggugaggaagcggug

SEQ ID NO: 4899 - RNA, 21 nt, Artificial sequence
  specific aptamers
ggguguggugaggaaguggag

SEQ ID NO: 4900 - RNA, 21 nt, Artificial sequence
  specific aptamers
ggguguggugaggaaguggcg

SEQ ID NO: 4901 - RNA, 21 nt, Artificial sequence
  specific aptamers
ggguguggugaggaaguggug

SEQ ID NO: 4902 - RNA, 21 nt, Artificial sequence
  specific aptamers
ggguguggugaggaugaggag

SEQ ID NO: 4903 - RNA, 21 nt, Artificial sequence
  specific aptamers
ggguguggugaggaugaggcg

SEQ ID NO: 4904 - RNA, 21 nt, Artificial sequence
  specific aptamers
ggguguggugaggaugaggug

SEQ ID NO: 4905 - RNA, 21 nt, Artificial sequence
  specific aptamers
ggguguggugaggaugcggag

SEQ ID NO: 4906 - RNA, 21 nt, Artificial sequence
  specific aptamers
ggguguggugaggaugcggcg

SEQ ID NO: 4907 - RNA, 21 nt, Artificial sequence
  specific aptamers
ggguguggugaggaugcggug

SEQ ID NO: 4908 - RNA, 21 nt, Artificial sequence
  specific aptamers
ggguguggugaggauguggag

SEQ ID NO: 4909 - RNA, 21 nt, Artificial sequence
  specific aptamers
ggguguggugaggauguggcg

SEQ ID NO: 4910 - RNA, 21 nt, Artificial sequence
  specific aptamers
ggguguggugaggauguggug

SEQ ID NO: 4911 - RNA, 20 nt, Artificial sequence
  specific aptamers
ggguguggugaggagaggag

SEQ ID NO: 4912 - RNA, 20 nt, Artificial sequence
  specific aptamers
ggguguggugaggagaggcg

SEQ ID NO: 4913 - RNA, 20 nt, Artificial sequence
  specific aptamers
ggguguggugaggagaggug

SEQ ID NO: 4914 - RNA, 20 nt, Artificial sequence
  specific aptamers
ggguguggugaggagcggag

SEQ ID NO: 4915 - RNA, 20 nt, Artificial sequence
  specific aptamers
ggguguggugaggagcggcg

SEQ ID NO: 4916 - RNA, 20 nt, Artificial sequence
  specific aptamers
ggguguggugaggagcggug

SEQ ID NO: 4917 - RNA, 20 nt, Artificial sequence
  specific aptamers
ggguguggugaggaguggag

SEQ ID NO: 4918 - RNA, 20 nt, Artificial sequence
  specific aptamers
ggguguggugaggaguggcg

SEQ ID NO: 4919 - RNA, 20 nt, Artificial sequence
  specific aptamers
ggguguggugaggaguggug

SEQ ID NO: 4920 - RNA, 21 nt, Artificial sequence
  specific aptamers
ggguguggugagguagaggag

SEQ ID NO: 4921 - RNA, 21 nt, Artificial sequence
  specific aptamers
ggguguggugagguagaggcg

SEQ ID NO: 4922 - RNA, 21 nt, Artificial sequence
  specific aptamers
ggguguggugagguagaggug

SEQ ID NO: 4923 - RNA, 21 nt, Artificial sequence
  specific aptamers
ggguguggugagguagcggag

SEQ ID NO: 4924 - RNA, 21 nt, Artificial sequence
  specific aptamers
ggguguggugagguagcggcg

SEQ ID NO: 4925 - RNA, 21 nt, Artificial sequence
  specific aptamers
ggguguggugagguagcggug

SEQ ID NO: 4926 - RNA, 21 nt, Artificial sequence
  specific aptamers
ggguguggugagguaguggag

SEQ ID NO: 4927 - RNA, 21 nt, Artificial sequence
  specific aptamers
ggguguggugagguaguggcg

SEQ ID NO: 4928 - RNA, 21 nt, Artificial sequence
  specific aptamers
ggguguggugagguaguggug

SEQ ID NO: 4929 - RNA, 21 nt, Artificial sequence
  specific aptamers
ggguguggugagguugaggag

SEQ ID NO: 4930 - RNA, 21 nt, Artificial sequence
  specific aptamers
ggguguggugagguugaggcg

SEQ ID NO: 4931 - RNA, 21 nt, Artificial sequence
  specific aptamers
ggguguggugagguugaggug

SEQ ID NO: 4932 - RNA, 21 nt, Artificial sequence
  specific aptamers
ggguguggugagguugcggag

SEQ ID NO: 4933 - RNA, 21 nt, Artificial sequence
  specific aptamers
ggguguggugagguugcggcg

SEQ ID NO: 4934 - RNA, 21 nt, Artificial sequence
  specific aptamers
ggguguggugagguugcggug

SEQ ID NO: 4935 - RNA, 21 nt, Artificial sequence
  specific aptamers
ggguguggugagguuguggag

SEQ ID NO: 4936 - RNA, 21 nt, Artificial sequence
  specific aptamers
ggguguggugagguuguggcg

SEQ ID NO: 4937 - RNA, 21 nt, Artificial sequence
  specific aptamers
ggguguggugagguuguggug

SEQ ID NO: 4938 - RNA, 20 nt, Artificial sequence
  specific aptamers
ggguguggugaggugaggag

SEQ ID NO: 4939 - RNA, 20 nt, Artificial sequence
  specific aptamers
ggguguggugaggugaggcg

SEQ ID NO: 4940 - RNA, 20 nt, Artificial sequence
  specific aptamers
ggguguggugaggugaggug

SEQ ID NO: 4941 - RNA, 20 nt, Artificial sequence
  specific aptamers
ggguguggugaggugcggag

SEQ ID NO: 4942 - RNA, 20 nt, Artificial sequence
  specific aptamers
ggguguggugaggugcggcg

SEQ ID NO: 4943 - RNA, 20 nt, Artificial sequence
  specific aptamers
ggguguggugaggugcggug

SEQ ID NO: 4944 - RNA, 20 nt, Artificial sequence
  specific aptamers
ggguguggugagguguggag

SEQ ID NO: 4945 - RNA, 20 nt, Artificial sequence
  specific aptamers
ggguguggugagguguggcg

SEQ ID NO: 4946 - RNA, 20 nt, Artificial sequence
  specific aptamers
ggguguggugagguguggug

SEQ ID NO: 4947 - RNA, 21 nt, Artificial sequence
  specific aptamers
gggugugguguggaagaggag

SEQ ID NO: 4948 - RNA, 21 nt, Artificial sequence
  specific aptamers
gggugugguguggaagaggcg

SEQ ID NO: 4949 - RNA, 21 nt, Artificial sequence
  specific aptamers
gggugugguguggaagaggug

SEQ ID NO: 4950 - RNA, 21 nt, Artificial sequence
  specific aptamers
gggugugguguggaagcggag

SEQ ID NO: 4951 - RNA, 21 nt, Artificial sequence
  specific aptamers
gggugugguguggaagcggcg

SEQ ID NO: 4952 - RNA, 21 nt, Artificial sequence
  specific aptamers
gggugugguguggaagcggug

SEQ ID NO: 4953 - RNA, 21 nt, Artificial sequence
  specific aptamers
gggugugguguggaaguggag

SEQ ID NO: 4954 - RNA, 21 nt, Artificial sequence
  specific aptamers
gggugugguguggaaguggcg

SEQ ID NO: 4955 - RNA, 21 nt, Artificial sequence
  specific aptamers
gggugugguguggaaguggug

SEQ ID NO: 4956 - RNA, 21 nt, Artificial sequence
  specific aptamers
gggugugguguggaugaggag

SEQ ID NO: 4957 - RNA, 21 nt, Artificial sequence
  specific aptamers
gggugugguguggaugaggcg

SEQ ID NO: 4958 - RNA, 21 nt, Artificial sequence
  specific aptamers
gggugugguguggaugaggug

SEQ ID NO: 4959 - RNA, 21 nt, Artificial sequence
  specific aptamers
gggugugguguggaugcggag

SEQ ID NO: 4960 - RNA, 21 nt, Artificial sequence
  specific aptamers
gggugugguguggaugcggcg

SEQ ID NO: 4961 - RNA, 21 nt, Artificial sequence
  specific aptamers
gggugugguguggaugcggug

SEQ ID NO: 4962 - RNA, 21 nt, Artificial sequence
  specific aptamers
gggugugguguggauguggag

SEQ ID NO: 4963 - RNA, 21 nt, Artificial sequence
  specific aptamers
gggugugguguggauguggcg

SEQ ID NO: 4964 - RNA, 21 nt, Artificial sequence
  specific aptamers
gggugugguguggauguggug

SEQ ID NO: 4965 - RNA, 20 nt, Artificial sequence
  specific aptamers
gggugugguguggagaggag

SEQ ID NO: 4966 - RNA, 20 nt, Artificial sequence
  specific aptamers
gggugugguguggagaggcg

SEQ ID NO: 4967 - RNA, 20 nt, Artificial sequence
  specific aptamers
gggugugguguggagaggug

SEQ ID NO: 4968 - RNA, 20 nt, Artificial sequence
  specific aptamers
gggugugguguggagcggag

SEQ ID NO: 4969 - RNA, 20 nt, Artificial sequence
  specific aptamers
gggugugguguggagcggcg

SEQ ID NO: 4970 - RNA, 20 nt, Artificial sequence
  specific aptamers
gggugugguguggagcggug

SEQ ID NO: 4971 - RNA, 20 nt, Artificial sequence
  specific aptamers
gggugugguguggaguggag

SEQ ID NO: 4972 - RNA, 20 nt, Artificial sequence
  specific aptamers
gggugugguguggaguggcg

SEQ ID NO: 4973 - RNA, 20 nt, Artificial sequence
  specific aptamers
gggugugguguggaguggug

SEQ ID NO: 4974 - RNA, 21 nt, Artificial sequence
  specific aptamers
ggguguggugugguagaggag

SEQ ID NO: 4975 - RNA, 21 nt, Artificial sequence
  specific aptamers
ggguguggugugguagaggcg

SEQ ID NO: 4976 - RNA, 21 nt, Artificial sequence
  specific aptamers
ggguguggugugguagaggug

SEQ ID NO: 4977 - RNA, 21 nt, Artificial sequence
  specific aptamers
ggguguggugugguagcggag

SEQ ID NO: 4978 - RNA, 21 nt, Artificial sequence
  specific aptamers
ggguguggugugguagcggcg

SEQ ID NO: 4979 - RNA, 21 nt, Artificial sequence
  specific aptamers
ggguguggugugguagcggug

SEQ ID NO: 4980 - RNA, 21 nt, Artificial sequence
  specific aptamers
ggguguggugugguaguggag

SEQ ID NO: 4981 - RNA, 21 nt, Artificial sequence
  specific aptamers
ggguguggugugguaguggcg

SEQ ID NO: 4982 - RNA, 21 nt, Artificial sequence
  specific aptamers
ggguguggugugguaguggug

SEQ ID NO: 4983 - RNA, 21 nt, Artificial sequence
  specific aptamers
ggguguggugugguugaggag

SEQ ID NO: 4984 - RNA, 21 nt, Artificial sequence
  specific aptamers
ggguguggugugguugaggcg

SEQ ID NO: 4985 - RNA, 21 nt, Artificial sequence
  specific aptamers
ggguguggugugguugaggug

SEQ ID NO: 4986 - RNA, 21 nt, Artificial sequence
  specific aptamers
ggguguggugugguugcggag

SEQ ID NO: 4987 - RNA, 21 nt, Artificial sequence
  specific aptamers
ggguguggugugguugcggcg

SEQ ID NO: 4988 - RNA, 21 nt, Artificial sequence
  specific aptamers
ggguguggugugguugcggug

SEQ ID NO: 4989 - RNA, 21 nt, Artificial sequence
  specific aptamers
ggguguggugugguuguggag

SEQ ID NO: 4990 - RNA, 21 nt, Artificial sequence
  specific aptamers
ggguguggugugguuguggcg

SEQ ID NO: 4991 - RNA, 21 nt, Artificial sequence
  specific aptamers
ggguguggugugguuguggug

SEQ ID NO: 4992 - RNA, 20 nt, Artificial sequence
  specific aptamers
gggugugguguggugaggag

SEQ ID NO: 4993 - RNA, 20 nt, Artificial sequence
  specific aptamers
gggugugguguggugaggcg

SEQ ID NO: 4994 - RNA, 20 nt, Artificial sequence
  specific aptamers
gggugugguguggugaggug

SEQ ID NO: 4995 - RNA, 20 nt, Artificial sequence
  specific aptamers
gggugugguguggugcggag

SEQ ID NO: 4996 - RNA, 20 nt, Artificial sequence
  specific aptamers
gggugugguguggugcggcg

SEQ ID NO: 4997 - RNA, 20 nt, Artificial sequence
  specific aptamers
gggugugguguggugcggug

SEQ ID NO: 4998 - RNA, 20 nt, Artificial sequence
  specific aptamers
ggguguggugugguguggag

SEQ ID NO: 4999 - RNA, 20 nt, Artificial sequence
  specific aptamers
ggguguggugugguguggcg

SEQ ID NO: 5000 - RNA, 20 nt, Artificial sequence
  specific aptamers
ggguguggugugguguggug

SEQ ID NO: 5001 - RNA, 21 nt, Artificial sequence
  specific aptamers
gguagaggagaggaagaggag

SEQ ID NO: 5002 - RNA, 21 nt, Artificial sequence
  specific aptamers
gguagaggagaggaagaggcg

SEQ ID NO: 5003 - RNA, 21 nt, Artificial sequence
  specific aptamers
gguagaggagaggaagaggug

SEQ ID NO: 5004 - RNA, 21 nt, Artificial sequence
  specific aptamers
gguagaggagaggaagcggag

SEQ ID NO: 5005 - RNA, 21 nt, Artificial sequence
  specific aptamers
gguagaggagaggaagcggcg

SEQ ID NO: 5006 - RNA, 21 nt, Artificial sequence
  specific aptamers
gguagaggagaggaagcggug

SEQ ID NO: 5007 - RNA, 21 nt, Artificial sequence
  specific aptamers
gguagaggagaggaaguggag

SEQ ID NO: 5008 - RNA, 21 nt, Artificial sequence
  specific aptamers
gguagaggagaggaaguggcg

SEQ ID NO: 5009 - RNA, 21 nt, Artificial sequence
  specific aptamers
gguagaggagaggaaguggug

SEQ ID NO: 5010 - RNA, 21 nt, Artificial sequence
  specific aptamers
gguagaggagaggaugaggag

SEQ ID NO: 5011 - RNA, 21 nt, Artificial sequence
  specific aptamers
gguagaggagaggaugaggcg

SEQ ID NO: 5012 - RNA, 21 nt, Artificial sequence
  specific aptamers
gguagaggagaggaugaggug

SEQ ID NO: 5013 - RNA, 21 nt, Artificial sequence
  specific aptamers
gguagaggagaggaugcggag

SEQ ID NO: 5014 - RNA, 21 nt, Artificial sequence
  specific aptamers
gguagaggagaggaugcggcg

SEQ ID NO: 5015 - RNA, 21 nt, Artificial sequence
  specific aptamers
gguagaggagaggaugcggug

SEQ ID NO: 5016 - RNA, 21 nt, Artificial sequence
  specific aptamers
gguagaggagaggauguggag

SEQ ID NO: 5017 - RNA, 21 nt, Artificial sequence
  specific aptamers
gguagaggagaggauguggcg

SEQ ID NO: 5018 - RNA, 21 nt, Artificial sequence
  specific aptamers
gguagaggagaggauguggug

SEQ ID NO: 5019 - RNA, 20 nt, Artificial sequence
  specific aptamers
gguagaggagaggagaggag

SEQ ID NO: 5020 - RNA, 20 nt, Artificial sequence
  specific aptamers
gguagaggagaggagaggcg

SEQ ID NO: 5021 - RNA, 20 nt, Artificial sequence
  specific aptamers
gguagaggagaggagaggug

SEQ ID NO: 5022 - RNA, 20 nt, Artificial sequence
  specific aptamers
gguagaggagaggagcggag

SEQ ID NO: 5023 - RNA, 20 nt, Artificial sequence
  specific aptamers
gguagaggagaggagcggcg

SEQ ID NO: 5024 - RNA, 20 nt, Artificial sequence
  specific aptamers
gguagaggagaggagcggug

SEQ ID NO: 5025 - RNA, 20 nt, Artificial sequence
  specific aptamers
gguagaggagaggaguggag

SEQ ID NO: 5026 - RNA, 20 nt, Artificial sequence
  specific aptamers
gguagaggagaggaguggcg

SEQ ID NO: 5027 - RNA, 20 nt, Artificial sequence
  specific aptamers
gguagaggagaggaguggug

SEQ ID NO: 5028 - RNA, 21 nt, Artificial sequence
  specific aptamers
gguagaggagagguagaggag

SEQ ID NO: 5029 - RNA, 21 nt, Artificial sequence
  specific aptamers
gguagaggagagguagaggcg

SEQ ID NO: 5030 - RNA, 21 nt, Artificial sequence
  specific aptamers
gguagaggagagguagaggug

SEQ ID NO: 5031 - RNA, 21 nt, Artificial sequence
  specific aptamers
gguagaggagagguagcggag

SEQ ID NO: 5032 - RNA, 21 nt, Artificial sequence
  specific aptamers
gguagaggagagguagcggcg

SEQ ID NO: 5033 - RNA, 21 nt, Artificial sequence
  specific aptamers
gguagaggagagguagcggug

SEQ ID NO: 5034 - RNA, 21 nt, Artificial sequence
  specific aptamers
gguagaggagagguaguggag

SEQ ID NO: 5035 - RNA, 21 nt, Artificial sequence
  specific aptamers
gguagaggagagguaguggcg

SEQ ID NO: 5036 - RNA, 21 nt, Artificial sequence
  specific aptamers
gguagaggagagguaguggug

SEQ ID NO: 5037 - RNA, 21 nt, Artificial sequence
  specific aptamers
gguagaggagagguugaggag

SEQ ID NO: 5038 - RNA, 21 nt, Artificial sequence
  specific aptamers
gguagaggagagguugaggcg

SEQ ID NO: 5039 - RNA, 21 nt, Artificial sequence
  specific aptamers
gguagaggagagguugaggug

SEQ ID NO: 5040 - RNA, 21 nt, Artificial sequence
  specific aptamers
gguagaggagagguugcggag

SEQ ID NO: 5041 - RNA, 21 nt, Artificial sequence
  specific aptamers
gguagaggagagguugcggcg

SEQ ID NO: 5042 - RNA, 21 nt, Artificial sequence
  specific aptamers
gguagaggagagguugcggug

SEQ ID NO: 5043 - RNA, 21 nt, Artificial sequence
  specific aptamers
gguagaggagagguuguggag

SEQ ID NO: 5044 - RNA, 21 nt, Artificial sequence
  specific aptamers
gguagaggagagguuguggcg

SEQ ID NO: 5045 - RNA, 21 nt, Artificial sequence
  specific aptamers
gguagaggagagguuguggug

SEQ ID NO: 5046 - RNA, 20 nt, Artificial sequence
  specific aptamers
gguagaggagaggugaggag

SEQ ID NO: 5047 - RNA, 20 nt, Artificial sequence
  specific aptamers
gguagaggagaggugaggcg

SEQ ID NO: 5048 - RNA, 20 nt, Artificial sequence
  specific aptamers
gguagaggagaggugaggug

SEQ ID NO: 5049 - RNA, 20 nt, Artificial sequence
  specific aptamers
gguagaggagaggugcggag

SEQ ID NO: 5050 - RNA, 20 nt, Artificial sequence
  specific aptamers
gguagaggagaggugcggcg

SEQ ID NO: 5051 - RNA, 20 nt, Artificial sequence
  specific aptamers
gguagaggagaggugcggug

SEQ ID NO: 5052 - RNA, 20 nt, Artificial sequence
  specific aptamers
gguagaggagagguguggag

SEQ ID NO: 5053 - RNA, 20 nt, Artificial sequence
  specific aptamers
gguagaggagagguguggcg

SEQ ID NO: 5054 - RNA, 20 nt, Artificial sequence
  specific aptamers
gguagaggagagguguggug

SEQ ID NO: 5055 - RNA, 21 nt, Artificial sequence
  specific aptamers
gguagaggaguggaagaggag

SEQ ID NO: 5056 - RNA, 21 nt, Artificial sequence
  specific aptamers
gguagaggaguggaagaggcg

SEQ ID NO: 5057 - RNA, 21 nt, Artificial sequence
  specific aptamers
gguagaggaguggaagaggug

SEQ ID NO: 5058 - RNA, 21 nt, Artificial sequence
  specific aptamers
gguagaggaguggaagcggag

SEQ ID NO: 5059 - RNA, 21 nt, Artificial sequence
  specific aptamers
gguagaggaguggaagcggcg

SEQ ID NO: 5060 - RNA, 21 nt, Artificial sequence
  specific aptamers
gguagaggaguggaagcggug

SEQ ID NO: 5061 - RNA, 21 nt, Artificial sequence
  specific aptamers
gguagaggaguggaaguggag

SEQ ID NO: 5062 - RNA, 21 nt, Artificial sequence
  specific aptamers
gguagaggaguggaaguggcg

SEQ ID NO: 5063 - RNA, 21 nt, Artificial sequence
  specific aptamers
gguagaggaguggaaguggug

SEQ ID NO: 5064 - RNA, 21 nt, Artificial sequence
  specific aptamers
gguagaggaguggaugaggag

SEQ ID NO: 5065 - RNA, 21 nt, Artificial sequence
  specific aptamers
gguagaggaguggaugaggcg

SEQ ID NO: 5066 - RNA, 21 nt, Artificial sequence
  specific aptamers
gguagaggaguggaugaggug

SEQ ID NO: 5067 - RNA, 21 nt, Artificial sequence
  specific aptamers
gguagaggaguggaugcggag

SEQ ID NO: 5068 - RNA, 21 nt, Artificial sequence
  specific aptamers
gguagaggaguggaugcggcg

SEQ ID NO: 5069 - RNA, 21 nt, Artificial sequence
  specific aptamers
gguagaggaguggaugcggug

SEQ ID NO: 5070 - RNA, 21 nt, Artificial sequence
  specific aptamers
gguagaggaguggauguggag

SEQ ID NO: 5071 - RNA, 21 nt, Artificial sequence
  specific aptamers
gguagaggaguggauguggcg

SEQ ID NO: 5072 - RNA, 21 nt, Artificial sequence
  specific aptamers
gguagaggaguggauguggug

SEQ ID NO: 5073 - RNA, 20 nt, Artificial sequence
  specific aptamers
gguagaggaguggagaggag

SEQ ID NO: 5074 - RNA, 20 nt, Artificial sequence
  specific aptamers
gguagaggaguggagaggcg

SEQ ID NO: 5075 - RNA, 20 nt, Artificial sequence
  specific aptamers
gguagaggaguggagaggug

SEQ ID NO: 5076 - RNA, 20 nt, Artificial sequence
  specific aptamers
gguagaggaguggagcggag

SEQ ID NO: 5077 - RNA, 20 nt, Artificial sequence
  specific aptamers
gguagaggaguggagcggcg

SEQ ID NO: 5078 - RNA, 20 nt, Artificial sequence
  specific aptamers
gguagaggaguggagcggug

SEQ ID NO: 5079 - RNA, 20 nt, Artificial sequence
  specific aptamers
gguagaggaguggaguggag

SEQ ID NO: 5080 - RNA, 20 nt, Artificial sequence
  specific aptamers
gguagaggaguggaguggcg

SEQ ID NO: 5081 - RNA, 20 nt, Artificial sequence
  specific aptamers
gguagaggaguggaguggug

SEQ ID NO: 5082 - RNA, 21 nt, Artificial sequence
  specific aptamers
gguagaggagugguagaggag

SEQ ID NO: 5083 - RNA, 21 nt, Artificial sequence
  specific aptamers
gguagaggagugguagaggcg

SEQ ID NO: 5084 - RNA, 21 nt, Artificial sequence
  specific aptamers
gguagaggagugguagaggug

SEQ ID NO: 5085 - RNA, 21 nt, Artificial sequence
  specific aptamers
gguagaggagugguagcggag

SEQ ID NO: 5086 - RNA, 21 nt, Artificial sequence
  specific aptamers
gguagaggagugguagcggcg

SEQ ID NO: 5087 - RNA, 21 nt, Artificial sequence
  specific aptamers
gguagaggagugguagcggug

SEQ ID NO: 5088 - RNA, 21 nt, Artificial sequence
  specific aptamers
gguagaggagugguaguggag

SEQ ID NO: 5089 - RNA, 21 nt, Artificial sequence
  specific aptamers
gguagaggagugguaguggcg

SEQ ID NO: 5090 - RNA, 21 nt, Artificial sequence
  specific aptamers
gguagaggagugguaguggug

SEQ ID NO: 5091 - RNA, 21 nt, Artificial sequence
  specific aptamers
gguagaggagugguugaggag

SEQ ID NO: 5092 - RNA, 21 nt, Artificial sequence
  specific aptamers
gguagaggagugguugaggcg

SEQ ID NO: 5093 - RNA, 21 nt, Artificial sequence
  specific aptamers
gguagaggagugguugaggug

SEQ ID NO: 5094 - RNA, 21 nt, Artificial sequence
  specific aptamers
gguagaggagugguugcggag

SEQ ID NO: 5095 - RNA, 21 nt, Artificial sequence
  specific aptamers
gguagaggagugguugcggcg

SEQ ID NO: 5096 - RNA, 21 nt, Artificial sequence
  specific aptamers
gguagaggagugguugcggug

SEQ ID NO: 5097 - RNA, 21 nt, Artificial sequence
  specific aptamers
gguagaggagugguuguggag

SEQ ID NO: 5098 - RNA, 21 nt, Artificial sequence
  specific aptamers
gguagaggagugguuguggcg

SEQ ID NO: 5099 - RNA, 21 nt, Artificial sequence
  specific aptamers
gguagaggagugguuguggug

SEQ ID NO: 5100 - RNA, 20 nt, Artificial sequence
  specific aptamers
gguagaggaguggugaggag

SEQ ID NO: 5101 - RNA, 20 nt, Artificial sequence
  specific aptamers
gguagaggaguggugaggcg

SEQ ID NO: 5102 - RNA, 20 nt, Artificial sequence
  specific aptamers
gguagaggaguggugaggug

SEQ ID NO: 5103 - RNA, 20 nt, Artificial sequence
  specific aptamers
gguagaggaguggugcggag

SEQ ID NO: 5104 - RNA, 20 nt, Artificial sequence
  specific aptamers
gguagaggaguggugcggcg

SEQ ID NO: 5105 - RNA, 20 nt, Artificial sequence
  specific aptamers
gguagaggaguggugcggug

SEQ ID NO: 5106 - RNA, 20 nt, Artificial sequence
  specific aptamers
gguagaggagugguguggag

SEQ ID NO: 5107 - RNA, 20 nt, Artificial sequence
  specific aptamers
gguagaggagugguguggcg

SEQ ID NO: 5108 - RNA, 20 nt, Artificial sequence
  specific aptamers
gguagaggagugguguggug

SEQ ID NO: 5109 - RNA, 21 nt, Artificial sequence
  specific aptamers
gguagaggugaggaagaggag

SEQ ID NO: 5110 - RNA, 21 nt, Artificial sequence
  specific aptamers
gguagaggugaggaagaggcg

SEQ ID NO: 5111 - RNA, 21 nt, Artificial sequence
  specific aptamers
gguagaggugaggaagaggug

SEQ ID NO: 5112 - RNA, 21 nt, Artificial sequence
  specific aptamers
gguagaggugaggaagcggag

SEQ ID NO: 5113 - RNA, 21 nt, Artificial sequence
  specific aptamers
gguagaggugaggaagcggcg

SEQ ID NO: 5114 - RNA, 21 nt, Artificial sequence
  specific aptamers
gguagaggugaggaagcggug

SEQ ID NO: 5115 - RNA, 21 nt, Artificial sequence
  specific aptamers
gguagaggugaggaaguggag

SEQ ID NO: 5116 - RNA, 21 nt, Artificial sequence
  specific aptamers
gguagaggugaggaaguggcg

SEQ ID NO: 5117 - RNA, 21 nt, Artificial sequence
  specific aptamers
gguagaggugaggaaguggug

SEQ ID NO: 5118 - RNA, 21 nt, Artificial sequence
  specific aptamers
gguagaggugaggaugaggag

SEQ ID NO: 5119 - RNA, 21 nt, Artificial sequence
  specific aptamers
gguagaggugaggaugaggcg

SEQ ID NO: 5120 - RNA, 21 nt, Artificial sequence
  specific aptamers
gguagaggugaggaugaggug

SEQ ID NO: 5121 - RNA, 21 nt, Artificial sequence
  specific aptamers
gguagaggugaggaugcggag

SEQ ID NO: 5122 - RNA, 21 nt, Artificial sequence
  specific aptamers
gguagaggugaggaugcggcg

SEQ ID NO: 5123 - RNA, 21 nt, Artificial sequence
  specific aptamers
gguagaggugaggaugcggug

SEQ ID NO: 5124 - RNA, 21 nt, Artificial sequence
  specific aptamers
gguagaggugaggauguggag

SEQ ID NO: 5125 - RNA, 21 nt, Artificial sequence
  specific aptamers
gguagaggugaggauguggcg

SEQ ID NO: 5126 - RNA, 21 nt, Artificial sequence
  specific aptamers
gguagaggugaggauguggug

SEQ ID NO: 5127 - RNA, 20 nt, Artificial sequence
  specific aptamers
gguagaggugaggagaggag

SEQ ID NO: 5128 - RNA, 20 nt, Artificial sequence
  specific aptamers
gguagaggugaggagaggcg

SEQ ID NO: 5129 - RNA, 20 nt, Artificial sequence
  specific aptamers
gguagaggugaggagaggug

SEQ ID NO: 5130 - RNA, 20 nt, Artificial sequence
  specific aptamers
gguagaggugaggagcggag

SEQ ID NO: 5131 - RNA, 20 nt, Artificial sequence
  specific aptamers
gguagaggugaggagcggcg

SEQ ID NO: 5132 - RNA, 20 nt, Artificial sequence
  specific aptamers
gguagaggugaggagcggug

SEQ ID NO: 5133 - RNA, 20 nt, Artificial sequence
  specific aptamers
gguagaggugaggaguggag

SEQ ID NO: 5134 - RNA, 20 nt, Artificial sequence
  specific aptamers
gguagaggugaggaguggcg

SEQ ID NO: 5135 - RNA, 20 nt, Artificial sequence
  specific aptamers
gguagaggugaggaguggug

SEQ ID NO: 5136 - RNA, 21 nt, Artificial sequence
  specific aptamers
gguagaggugagguagaggag

SEQ ID NO: 5137 - RNA, 21 nt, Artificial sequence
  specific aptamers
gguagaggugagguagaggcg

SEQ ID NO: 5138 - RNA, 21 nt, Artificial sequence
  specific aptamers
gguagaggugagguagaggug

SEQ ID NO: 5139 - RNA, 21 nt, Artificial sequence
  specific aptamers
gguagaggugagguagcggag

SEQ ID NO: 5140 - RNA, 21 nt, Artificial sequence
  specific aptamers
gguagaggugagguagcggcg

SEQ ID NO: 5141 - RNA, 21 nt, Artificial sequence
  specific aptamers
gguagaggugagguagcggug

SEQ ID NO: 5142 - RNA, 21 nt, Artificial sequence
  specific aptamers
gguagaggugagguaguggag

SEQ ID NO: 5143 - RNA, 21 nt, Artificial sequence
  specific aptamers
gguagaggugagguaguggcg

SEQ ID NO: 5144 - RNA, 21 nt, Artificial sequence
  specific aptamers
gguagaggugagguaguggug

SEQ ID NO: 5145 - RNA, 21 nt, Artificial sequence
  specific aptamers
gguagaggugagguugaggag

SEQ ID NO: 5146 - RNA, 21 nt, Artificial sequence
  specific aptamers
gguagaggugagguugaggcg

SEQ ID NO: 5147 - RNA, 21 nt, Artificial sequence
  specific aptamers
gguagaggugagguugaggug

SEQ ID NO: 5148 - RNA, 21 nt, Artificial sequence
  specific aptamers
gguagaggugagguugcggag

SEQ ID NO: 5149 - RNA, 21 nt, Artificial sequence
  specific aptamers
gguagaggugagguugcggcg

SEQ ID NO: 5150 - RNA, 21 nt, Artificial sequence
  specific aptamers
gguagaggugagguugcggug

SEQ ID NO: 5151 - RNA, 21 nt, Artificial sequence
  specific aptamers
gguagaggugagguuguggag

SEQ ID NO: 5152 - RNA, 21 nt, Artificial sequence
  specific aptamers
gguagaggugagguuguggcg

SEQ ID NO: 5153 - RNA, 21 nt, Artificial sequence
  specific aptamers
gguagaggugagguuguggug

SEQ ID NO: 5154 - RNA, 20 nt, Artificial sequence
  specific aptamers
gguagaggugaggugaggag

SEQ ID NO: 5155 - RNA, 20 nt, Artificial sequence
  specific aptamers
gguagaggugaggugaggcg

SEQ ID NO: 5156 - RNA, 20 nt, Artificial sequence
  specific aptamers
gguagaggugaggugaggug

SEQ ID NO: 5157 - RNA, 20 nt, Artificial sequence
  specific aptamers
gguagaggugaggugcggag

SEQ ID NO: 5158 - RNA, 20 nt, Artificial sequence
  specific aptamers
gguagaggugaggugcggcg

SEQ ID NO: 5159 - RNA, 20 nt, Artificial sequence
  specific aptamers
gguagaggugaggugcggug

SEQ ID NO: 5160 - RNA, 20 nt, Artificial sequence
  specific aptamers
gguagaggugagguguggag

SEQ ID NO: 5161 - RNA, 20 nt, Artificial sequence
  specific aptamers
gguagaggugagguguggcg

SEQ ID NO: 5162 - RNA, 20 nt, Artificial sequence
  specific aptamers
gguagaggugagguguggug

SEQ ID NO: 5163 - RNA, 21 nt, Artificial sequence
  specific aptamers
gguagagguguggaagaggag

SEQ ID NO: 5164 - RNA, 21 nt, Artificial sequence
  specific aptamers
gguagagguguggaagaggcg

SEQ ID NO: 5165 - RNA, 21 nt, Artificial sequence
  specific aptamers
gguagagguguggaagaggug

SEQ ID NO: 5166 - RNA, 21 nt, Artificial sequence
  specific aptamers
gguagagguguggaagcggag

SEQ ID NO: 5167 - RNA, 21 nt, Artificial sequence
  specific aptamers
gguagagguguggaagcggcg

SEQ ID NO: 5168 - RNA, 21 nt, Artificial sequence
  specific aptamers
gguagagguguggaagcggug

SEQ ID NO: 5169 - RNA, 21 nt, Artificial sequence
  specific aptamers
gguagagguguggaaguggag

SEQ ID NO: 5170 - RNA, 21 nt, Artificial sequence
  specific aptamers
gguagagguguggaaguggcg

SEQ ID NO: 5171 - RNA, 21 nt, Artificial sequence
  specific aptamers
gguagagguguggaaguggug

SEQ ID NO: 5172 - RNA, 21 nt, Artificial sequence
  specific aptamers
gguagagguguggaugaggag

SEQ ID NO: 5173 - RNA, 21 nt, Artificial sequence
  specific aptamers
gguagagguguggaugaggcg

SEQ ID NO: 5174 - RNA, 21 nt, Artificial sequence
  specific aptamers
gguagagguguggaugaggug

SEQ ID NO: 5175 - RNA, 21 nt, Artificial sequence
  specific aptamers
gguagagguguggaugcggag

SEQ ID NO: 5176 - RNA, 21 nt, Artificial sequence
  specific aptamers
gguagagguguggaugcggcg

SEQ ID NO: 5177 - RNA, 21 nt, Artificial sequence
  specific aptamers
gguagagguguggaugcggug

SEQ ID NO: 5178 - RNA, 21 nt, Artificial sequence
  specific aptamers
gguagagguguggauguggag

SEQ ID NO: 5179 - RNA, 21 nt, Artificial sequence
  specific aptamers
gguagagguguggauguggcg

SEQ ID NO: 5180 - RNA, 21 nt, Artificial sequence
  specific aptamers
gguagagguguggauguggug

SEQ ID NO: 5181 - RNA, 20 nt, Artificial sequence
  specific aptamers
gguagagguguggagaggag

SEQ ID NO: 5182 - RNA, 20 nt, Artificial sequence
  specific aptamers
gguagagguguggagaggcg

SEQ ID NO: 5183 - RNA, 20 nt, Artificial sequence
  specific aptamers
gguagagguguggagaggug

SEQ ID NO: 5184 - RNA, 20 nt, Artificial sequence
  specific aptamers
gguagagguguggagcggag

SEQ ID NO: 5185 - RNA, 20 nt, Artificial sequence
  specific aptamers
gguagagguguggagcggcg

SEQ ID NO: 5186 - RNA, 20 nt, Artificial sequence
  specific aptamers
gguagagguguggagcggug

SEQ ID NO: 5187 - RNA, 20 nt, Artificial sequence
  specific aptamers
gguagagguguggaguggag

SEQ ID NO: 5188 - RNA, 20 nt, Artificial sequence
  specific aptamers
gguagagguguggaguggcg

SEQ ID NO: 5189 - RNA, 20 nt, Artificial sequence
  specific aptamers
gguagagguguggaguggug

SEQ ID NO: 5190 - RNA, 21 nt, Artificial sequence
  specific aptamers
gguagaggugugguagaggag

SEQ ID NO: 5191 - RNA, 21 nt, Artificial sequence
  specific aptamers
gguagaggugugguagaggcg

SEQ ID NO: 5192 - RNA, 21 nt, Artificial sequence
  specific aptamers
gguagaggugugguagaggug

SEQ ID NO: 5193 - RNA, 21 nt, Artificial sequence
  specific aptamers
gguagaggugugguagcggag

SEQ ID NO: 5194 - RNA, 21 nt, Artificial sequence
  specific aptamers
gguagaggugugguagcggcg

SEQ ID NO: 5195 - RNA, 21 nt, Artificial sequence
  specific aptamers
gguagaggugugguagcggug

SEQ ID NO: 5196 - RNA, 21 nt, Artificial sequence
  specific aptamers
gguagaggugugguaguggag

SEQ ID NO: 5197 - RNA, 21 nt, Artificial sequence
  specific aptamers
gguagaggugugguaguggcg

SEQ ID NO: 5198 - RNA, 21 nt, Artificial sequence
  specific aptamers
gguagaggugugguaguggug

SEQ ID NO: 5199 - RNA, 21 nt, Artificial sequence
  specific aptamers
gguagaggugugguugaggag

SEQ ID NO: 5200 - RNA, 21 nt, Artificial sequence
  specific aptamers
gguagaggugugguugaggcg

SEQ ID NO: 5201 - RNA, 21 nt, Artificial sequence
  specific aptamers
gguagaggugugguugaggug

SEQ ID NO: 5202 - RNA, 21 nt, Artificial sequence
  specific aptamers
gguagaggugugguugcggag

SEQ ID NO: 5203 - RNA, 21 nt, Artificial sequence
  specific aptamers
gguagaggugugguugcggcg

SEQ ID NO: 5204 - RNA, 21 nt, Artificial sequence
  specific aptamers
gguagaggugugguugcggug

SEQ ID NO: 5205 - RNA, 21 nt, Artificial sequence
  specific aptamers
gguagaggugugguuguggag

SEQ ID NO: 5206 - RNA, 21 nt, Artificial sequence
  specific aptamers
gguagaggugugguuguggcg

SEQ ID NO: 5207 - RNA, 21 nt, Artificial sequence
  specific aptamers
gguagaggugugguuguggug

SEQ ID NO: 5208 - RNA, 20 nt, Artificial sequence
  specific aptamers
gguagagguguggugaggag

SEQ ID NO: 5209 - RNA, 20 nt, Artificial sequence
  specific aptamers
gguagagguguggugaggcg

SEQ ID NO: 5210 - RNA, 20 nt, Artificial sequence
  specific aptamers
gguagagguguggugaggug

SEQ ID NO: 5211 - RNA, 20 nt, Artificial sequence
  specific aptamers
gguagagguguggugcggag

SEQ ID NO: 5212 - RNA, 20 nt, Artificial sequence
  specific aptamers
gguagagguguggugcggcg

SEQ ID NO: 5213 - RNA, 20 nt, Artificial sequence
  specific aptamers
gguagagguguggugcggug

SEQ ID NO: 5214 - RNA, 20 nt, Artificial sequence
  specific aptamers
gguagaggugugguguggag

SEQ ID NO: 5215 - RNA, 20 nt, Artificial sequence
  specific aptamers
gguagaggugugguguggcg

SEQ ID NO: 5216 - RNA, 20 nt, Artificial sequence
  specific aptamers
gguagaggugugguguggug

SEQ ID NO: 5217 - RNA, 21 nt, Artificial sequence
  specific aptamers
gguaguggagaggaagaggag

SEQ ID NO: 5218 - RNA, 21 nt, Artificial sequence
  specific aptamers
gguaguggagaggaagaggcg

SEQ ID NO: 5219 - RNA, 21 nt, Artificial sequence
  specific aptamers
gguaguggagaggaagaggug

SEQ ID NO: 5220 - RNA, 21 nt, Artificial sequence
  specific aptamers
gguaguggagaggaagcggag

SEQ ID NO: 5221 - RNA, 21 nt, Artificial sequence
  specific aptamers
gguaguggagaggaagcggcg

SEQ ID NO: 5222 - RNA, 21 nt, Artificial sequence
  specific aptamers
gguaguggagaggaagcggug

SEQ ID NO: 5223 - RNA, 21 nt, Artificial sequence
  specific aptamers
gguaguggagaggaaguggag

SEQ ID NO: 5224 - RNA, 21 nt, Artificial sequence
  specific aptamers
gguaguggagaggaaguggcg

SEQ ID NO: 5225 - RNA, 21 nt, Artificial sequence
  specific aptamers
gguaguggagaggaaguggug

SEQ ID NO: 5226 - RNA, 21 nt, Artificial sequence
  specific aptamers
gguaguggagaggaugaggag

SEQ ID NO: 5227 - RNA, 21 nt, Artificial sequence
  specific aptamers
gguaguggagaggaugaggcg

SEQ ID NO: 5228 - RNA, 21 nt, Artificial sequence
  specific aptamers
gguaguggagaggaugaggug

SEQ ID NO: 5229 - RNA, 21 nt, Artificial sequence
  specific aptamers
gguaguggagaggaugcggag

SEQ ID NO: 5230 - RNA, 21 nt, Artificial sequence
  specific aptamers
gguaguggagaggaugcggcg

SEQ ID NO: 5231 - RNA, 21 nt, Artificial sequence
  specific aptamers
gguaguggagaggaugcggug

SEQ ID NO: 5232 - RNA, 21 nt, Artificial sequence
  specific aptamers
gguaguggagaggauguggag

SEQ ID NO: 5233 - RNA, 21 nt, Artificial sequence
  specific aptamers
gguaguggagaggauguggcg

SEQ ID NO: 5234 - RNA, 21 nt, Artificial sequence
  specific aptamers
gguaguggagaggauguggug

SEQ ID NO: 5235 - RNA, 20 nt, Artificial sequence
  specific aptamers
gguaguggagaggagaggag

SEQ ID NO: 5236 - RNA, 20 nt, Artificial sequence
  specific aptamers
gguaguggagaggagaggcg

SEQ ID NO: 5237 - RNA, 20 nt, Artificial sequence
  specific aptamers
gguaguggagaggagaggug

SEQ ID NO: 5238 - RNA, 20 nt, Artificial sequence
  specific aptamers
gguaguggagaggagcggag

SEQ ID NO: 5239 - RNA, 20 nt, Artificial sequence
  specific aptamers
gguaguggagaggagcggcg

SEQ ID NO: 5240 - RNA, 20 nt, Artificial sequence
  specific aptamers
gguaguggagaggagcggug

SEQ ID NO: 5241 - RNA, 20 nt, Artificial sequence
  specific aptamers
gguaguggagaggaguggag

SEQ ID NO: 5242 - RNA, 20 nt, Artificial sequence
  specific aptamers
gguaguggagaggaguggcg

SEQ ID NO: 5243 - RNA, 20 nt, Artificial sequence
  specific aptamers
gguaguggagaggaguggug

SEQ ID NO: 5244 - RNA, 21 nt, Artificial sequence
  specific aptamers
gguaguggagagguagaggag

SEQ ID NO: 5245 - RNA, 21 nt, Artificial sequence
  specific aptamers
gguaguggagagguagaggcg

SEQ ID NO: 5246 - RNA, 21 nt, Artificial sequence
  specific aptamers
gguaguggagagguagaggug

SEQ ID NO: 5247 - RNA, 21 nt, Artificial sequence
  specific aptamers
gguaguggagagguagcggag

SEQ ID NO: 5248 - RNA, 21 nt, Artificial sequence
  specific aptamers
gguaguggagagguagcggcg

SEQ ID NO: 5249 - RNA, 21 nt, Artificial sequence
  specific aptamers
gguaguggagagguagcggug

SEQ ID NO: 5250 - RNA, 21 nt, Artificial sequence
  specific aptamers
gguaguggagagguaguggag

SEQ ID NO: 5251 - RNA, 21 nt, Artificial sequence
  specific aptamers
gguaguggagagguaguggcg

SEQ ID NO: 5252 - RNA, 21 nt, Artificial sequence
  specific aptamers
gguaguggagagguaguggug

SEQ ID NO: 5253 - RNA, 21 nt, Artificial sequence
  specific aptamers
gguaguggagagguugaggag

SEQ ID NO: 5254 - RNA, 21 nt, Artificial sequence
  specific aptamers
gguaguggagagguugaggcg

SEQ ID NO: 5255 - RNA, 21 nt, Artificial sequence
  specific aptamers
gguaguggagagguugaggug

SEQ ID NO: 5256 - RNA, 21 nt, Artificial sequence
  specific aptamers
gguaguggagagguugcggag

SEQ ID NO: 5257 - RNA, 21 nt, Artificial sequence
  specific aptamers
gguaguggagagguugcggcg

SEQ ID NO: 5258 - RNA, 21 nt, Artificial sequence
  specific aptamers
gguaguggagagguugcggug

SEQ ID NO: 5259 - RNA, 21 nt, Artificial sequence
  specific aptamers
gguaguggagagguuguggag

SEQ ID NO: 5260 - RNA, 21 nt, Artificial sequence
  specific aptamers
gguaguggagagguuguggcg

SEQ ID NO: 5261 - RNA, 21 nt, Artificial sequence
  specific aptamers
gguaguggagagguuguggug

SEQ ID NO: 5262 - RNA, 20 nt, Artificial sequence
  specific aptamers
gguaguggagaggugaggag

SEQ ID NO: 5263 - RNA, 20 nt, Artificial sequence
  specific aptamers
gguaguggagaggugaggcg

SEQ ID NO: 5264 - RNA, 20 nt, Artificial sequence
  specific aptamers
gguaguggagaggugaggug

SEQ ID NO: 5265 - RNA, 20 nt, Artificial sequence
  specific aptamers
gguaguggagaggugcggag

SEQ ID NO: 5266 - RNA, 20 nt, Artificial sequence
  specific aptamers
gguaguggagaggugcggcg

SEQ ID NO: 5267 - RNA, 20 nt, Artificial sequence
  specific aptamers
gguaguggagaggugcggug

SEQ ID NO: 5268 - RNA, 20 nt, Artificial sequence
  specific aptamers
gguaguggagagguguggag

SEQ ID NO: 5269 - RNA, 20 nt, Artificial sequence
  specific aptamers
gguaguggagagguguggcg

SEQ ID NO: 5270 - RNA, 20 nt, Artificial sequence
  specific aptamers
gguaguggagagguguggug

SEQ ID NO: 5271 - RNA, 21 nt, Artificial sequence
  specific aptamers
gguaguggaguggaagaggag

SEQ ID NO: 5272 - RNA, 21 nt, Artificial sequence
  specific aptamers
gguaguggaguggaagaggcg

SEQ ID NO: 5273 - RNA, 21 nt, Artificial sequence
  specific aptamers
gguaguggaguggaagaggug

SEQ ID NO: 5274 - RNA, 21 nt, Artificial sequence
  specific aptamers
gguaguggaguggaagcggag

SEQ ID NO: 5275 - RNA, 21 nt, Artificial sequence
  specific aptamers
gguaguggaguggaagcggcg

SEQ ID NO: 5276 - RNA, 21 nt, Artificial sequence
  specific aptamers
gguaguggaguggaagcggug

SEQ ID NO: 5277 - RNA, 21 nt, Artificial sequence
  specific aptamers
gguaguggaguggaaguggag

SEQ ID NO: 5278 - RNA, 21 nt, Artificial sequence
  specific aptamers
gguaguggaguggaaguggcg

SEQ ID NO: 5279 - RNA, 21 nt, Artificial sequence
  specific aptamers
gguaguggaguggaaguggug

SEQ ID NO: 5280 - RNA, 21 nt, Artificial sequence
  specific aptamers
gguaguggaguggaugaggag

SEQ ID NO: 5281 - RNA, 21 nt, Artificial sequence
  specific aptamers
gguaguggaguggaugaggcg

SEQ ID NO: 5282 - RNA, 21 nt, Artificial sequence
  specific aptamers
gguaguggaguggaugaggug

SEQ ID NO: 5283 - RNA, 21 nt, Artificial sequence
  specific aptamers
gguaguggaguggaugcggag

SEQ ID NO: 5284 - RNA, 21 nt, Artificial sequence
  specific aptamers
gguaguggaguggaugcggcg

SEQ ID NO: 5285 - RNA, 21 nt, Artificial sequence
  specific aptamers
gguaguggaguggaugcggug

SEQ ID NO: 5286 - RNA, 21 nt, Artificial sequence
  specific aptamers
gguaguggaguggauguggag

SEQ ID NO: 5287 - RNA, 21 nt, Artificial sequence
  specific aptamers
gguaguggaguggauguggcg

SEQ ID NO: 5288 - RNA, 21 nt, Artificial sequence
  specific aptamers
gguaguggaguggauguggug

SEQ ID NO: 5289 - RNA, 20 nt, Artificial sequence
  specific aptamers
gguaguggaguggagaggag

SEQ ID NO: 5290 - RNA, 20 nt, Artificial sequence
  specific aptamers
gguaguggaguggagaggcg

SEQ ID NO: 5291 - RNA, 20 nt, Artificial sequence
  specific aptamers
gguaguggaguggagaggug

SEQ ID NO: 5292 - RNA, 20 nt, Artificial sequence
  specific aptamers
gguaguggaguggagcggag

SEQ ID NO: 5293 - RNA, 20 nt, Artificial sequence
  specific aptamers
gguaguggaguggagcggcg

SEQ ID NO: 5294 - RNA, 20 nt, Artificial sequence
  specific aptamers
gguaguggaguggagcggug

SEQ ID NO: 5295 - RNA, 20 nt, Artificial sequence
  specific aptamers
gguaguggaguggaguggag

SEQ ID NO: 5296 - RNA, 20 nt, Artificial sequence
  specific aptamers
gguaguggaguggaguggcg

SEQ ID NO: 5297 - RNA, 20 nt, Artificial sequence
  specific aptamers
gguaguggaguggaguggug

SEQ ID NO: 5298 - RNA, 21 nt, Artificial sequence
  specific aptamers
gguaguggagugguagaggag

SEQ ID NO: 5299 - RNA, 21 nt, Artificial sequence
  specific aptamers
gguaguggagugguagaggcg

SEQ ID NO: 5300 - RNA, 21 nt, Artificial sequence
  specific aptamers
gguaguggagugguagaggug

SEQ ID NO: 5301 - RNA, 21 nt, Artificial sequence
  specific aptamers
gguaguggagugguagcggag

SEQ ID NO: 5302 - RNA, 21 nt, Artificial sequence
  specific aptamers
gguaguggagugguagcggcg

SEQ ID NO: 5303 - RNA, 21 nt, Artificial sequence
  specific aptamers
gguaguggagugguagcggug

SEQ ID NO: 5304 - RNA, 21 nt, Artificial sequence
  specific aptamers
gguaguggagugguaguggag

SEQ ID NO: 5305 - RNA, 21 nt, Artificial sequence
  specific aptamers
gguaguggagugguaguggcg

SEQ ID NO: 5306 - RNA, 21 nt, Artificial sequence
  specific aptamers
gguaguggagugguaguggug

SEQ ID NO: 5307 - RNA, 21 nt, Artificial sequence
  specific aptamers
gguaguggagugguugaggag

SEQ ID NO: 5308 - RNA, 21 nt, Artificial sequence
  specific aptamers
gguaguggagugguugaggcg

SEQ ID NO: 5309 - RNA, 21 nt, Artificial sequence
  specific aptamers
gguaguggagugguugaggug

SEQ ID NO: 5310 - RNA, 21 nt, Artificial sequence
  specific aptamers
gguaguggagugguugcggag

SEQ ID NO: 5311 - RNA, 21 nt, Artificial sequence
  specific aptamers
gguaguggagugguugcggcg

SEQ ID NO: 5312 - RNA, 21 nt, Artificial sequence
  specific aptamers
gguaguggagugguugcggug

SEQ ID NO: 5313 - RNA, 21 nt, Artificial sequence
  specific aptamers
gguaguggagugguuguggag

SEQ ID NO: 5314 - RNA, 21 nt, Artificial sequence
  specific aptamers
gguaguggagugguuguggcg

SEQ ID NO: 5315 - RNA, 21 nt, Artificial sequence
  specific aptamers
gguaguggagugguuguggug

SEQ ID NO: 5316 - RNA, 20 nt, Artificial sequence
  specific aptamers
gguaguggaguggugaggag

SEQ ID NO: 5317 - RNA, 20 nt, Artificial sequence
  specific aptamers
gguaguggaguggugaggcg

SEQ ID NO: 5318 - RNA, 20 nt, Artificial sequence
  specific aptamers
gguaguggaguggugaggug

SEQ ID NO: 5319 - RNA, 20 nt, Artificial sequence
  specific aptamers
gguaguggaguggugcggag

SEQ ID NO: 5320 - RNA, 20 nt, Artificial sequence
  specific aptamers
gguaguggaguggugcggcg

SEQ ID NO: 5321 - RNA, 20 nt, Artificial sequence
  specific aptamers
gguaguggaguggugcggug

SEQ ID NO: 5322 - RNA, 20 nt, Artificial sequence
  specific aptamers
gguaguggagugguguggag

SEQ ID NO: 5323 - RNA, 20 nt, Artificial sequence
  specific aptamers
gguaguggagugguguggcg

SEQ ID NO: 5324 - RNA, 20 nt, Artificial sequence
  specific aptamers
gguaguggagugguguggug

SEQ ID NO: 5325 - RNA, 21 nt, Artificial sequence
  specific aptamers
gguaguggugaggaagaggag

SEQ ID NO: 5326 - RNA, 21 nt, Artificial sequence
  specific aptamers
gguaguggugaggaagaggcg

SEQ ID NO: 5327 - RNA, 21 nt, Artificial sequence
  specific aptamers
gguaguggugaggaagaggug

SEQ ID NO: 5328 - RNA, 21 nt, Artificial sequence
  specific aptamers
gguaguggugaggaagcggag

SEQ ID NO: 5329 - RNA, 21 nt, Artificial sequence
  specific aptamers
gguaguggugaggaagcggcg

SEQ ID NO: 5330 - RNA, 21 nt, Artificial sequence
  specific aptamers
gguaguggugaggaagcggug

SEQ ID NO: 5331 - RNA, 21 nt, Artificial sequence
  specific aptamers
gguaguggugaggaaguggag

SEQ ID NO: 5332 - RNA, 21 nt, Artificial sequence
  specific aptamers
gguaguggugaggaaguggcg

SEQ ID NO: 5333 - RNA, 21 nt, Artificial sequence
  specific aptamers
gguaguggugaggaaguggug

SEQ ID NO: 5334 - RNA, 21 nt, Artificial sequence
  specific aptamers
gguaguggugaggaugaggag

SEQ ID NO: 5335 - RNA, 21 nt, Artificial sequence
  specific aptamers
gguaguggugaggaugaggcg

SEQ ID NO: 5336 - RNA, 21 nt, Artificial sequence
  specific aptamers
gguaguggugaggaugaggug

SEQ ID NO: 5337 - RNA, 21 nt, Artificial sequence
  specific aptamers
gguaguggugaggaugcggag

SEQ ID NO: 5338 - RNA, 21 nt, Artificial sequence
  specific aptamers
gguaguggugaggaugcggcg

SEQ ID NO: 5339 - RNA, 21 nt, Artificial sequence
  specific aptamers
gguaguggugaggaugcggug

SEQ ID NO: 5340 - RNA, 21 nt, Artificial sequence
  specific aptamers
gguaguggugaggauguggag

SEQ ID NO: 5341 - RNA, 21 nt, Artificial sequence
  specific aptamers
gguaguggugaggauguggcg

SEQ ID NO: 5342 - RNA, 21 nt, Artificial sequence
  specific aptamers
gguaguggugaggauguggug

SEQ ID NO: 5343 - RNA, 20 nt, Artificial sequence
  specific aptamers
gguaguggugaggagaggag

SEQ ID NO: 5344 - RNA, 20 nt, Artificial sequence
  specific aptamers
gguaguggugaggagaggcg

SEQ ID NO: 5345 - RNA, 20 nt, Artificial sequence
  specific aptamers
gguaguggugaggagaggug

SEQ ID NO: 5346 - RNA, 20 nt, Artificial sequence
  specific aptamers
gguaguggugaggagcggag

SEQ ID NO: 5347 - RNA, 20 nt, Artificial sequence
  specific aptamers
gguaguggugaggagcggcg

SEQ ID NO: 5348 - RNA, 20 nt, Artificial sequence
  specific aptamers
gguaguggugaggagcggug

SEQ ID NO: 5349 - RNA, 20 nt, Artificial sequence
  specific aptamers
gguaguggugaggaguggag

SEQ ID NO: 5350 - RNA, 20 nt, Artificial sequence
  specific aptamers
gguaguggugaggaguggcg

SEQ ID NO: 5351 - RNA, 20 nt, Artificial sequence
  specific aptamers
gguaguggugaggaguggug

SEQ ID NO: 5352 - RNA, 21 nt, Artificial sequence
  specific aptamers
gguaguggugagguagaggag

SEQ ID NO: 5353 - RNA, 21 nt, Artificial sequence
  specific aptamers
gguaguggugagguagaggcg

SEQ ID NO: 5354 - RNA, 21 nt, Artificial sequence
  specific aptamers
gguaguggugagguagaggug

SEQ ID NO: 5355 - RNA, 21 nt, Artificial sequence
  specific aptamers
gguaguggugagguagcggag

SEQ ID NO: 5356 - RNA, 21 nt, Artificial sequence
  specific aptamers
gguaguggugagguagcggcg

SEQ ID NO: 5357 - RNA, 21 nt, Artificial sequence
  specific aptamers
gguaguggugagguagcggug

SEQ ID NO: 5358 - RNA, 21 nt, Artificial sequence
  specific aptamers
gguaguggugagguaguggag

SEQ ID NO: 5359 - RNA, 21 nt, Artificial sequence
  specific aptamers
gguaguggugagguaguggcg

SEQ ID NO: 5360 - RNA, 21 nt, Artificial sequence
  specific aptamers
gguaguggugagguaguggug

SEQ ID NO: 5361 - RNA, 21 nt, Artificial sequence
  specific aptamers
gguaguggugagguugaggag

SEQ ID NO: 5362 - RNA, 21 nt, Artificial sequence
  specific aptamers
gguaguggugagguugaggcg

SEQ ID NO: 5363 - RNA, 21 nt, Artificial sequence
  specific aptamers
gguaguggugagguugaggug

SEQ ID NO: 5364 - RNA, 21 nt, Artificial sequence
  specific aptamers
gguaguggugagguugcggag

SEQ ID NO: 5365 - RNA, 21 nt, Artificial sequence
  specific aptamers
gguaguggugagguugcggcg

SEQ ID NO: 5366 - RNA, 21 nt, Artificial sequence
  specific aptamers
gguaguggugagguugcggug

SEQ ID NO: 5367 - RNA, 21 nt, Artificial sequence
  specific aptamers
gguaguggugagguuguggag

SEQ ID NO: 5368 - RNA, 21 nt, Artificial sequence
  specific aptamers
gguaguggugagguuguggcg

SEQ ID NO: 5369 - RNA, 21 nt, Artificial sequence
  specific aptamers
gguaguggugagguuguggug

SEQ ID NO: 5370 - RNA, 20 nt, Artificial sequence
  specific aptamers
gguaguggugaggugaggag

SEQ ID NO: 5371 - RNA, 20 nt, Artificial sequence
  specific aptamers
gguaguggugaggugaggcg

SEQ ID NO: 5372 - RNA, 20 nt, Artificial sequence
  specific aptamers
gguaguggugaggugaggug

SEQ ID NO: 5373 - RNA, 20 nt, Artificial sequence
  specific aptamers
gguaguggugaggugcggag

SEQ ID NO: 5374 - RNA, 20 nt, Artificial sequence
  specific aptamers
gguaguggugaggugcggcg

SEQ ID NO: 5375 - RNA, 20 nt, Artificial sequence
  specific aptamers
gguaguggugaggugcggug

SEQ ID NO: 5376 - RNA, 20 nt, Artificial sequence
  specific aptamers
gguaguggugagguguggag

SEQ ID NO: 5377 - RNA, 20 nt, Artificial sequence
  specific aptamers
gguaguggugagguguggcg

SEQ ID NO: 5378 - RNA, 20 nt, Artificial sequence
  specific aptamers
gguaguggugagguguggug

SEQ ID NO: 5379 - RNA, 21 nt, Artificial sequence
  specific aptamers
gguagugguguggaagaggag

SEQ ID NO: 5380 - RNA, 21 nt, Artificial sequence
  specific aptamers
gguagugguguggaagaggcg

SEQ ID NO: 5381 - RNA, 21 nt, Artificial sequence
  specific aptamers
gguagugguguggaagaggug

SEQ ID NO: 5382 - RNA, 21 nt, Artificial sequence
  specific aptamers
gguagugguguggaagcggag

SEQ ID NO: 5383 - RNA, 21 nt, Artificial sequence
  specific aptamers
gguagugguguggaagcggcg

SEQ ID NO: 5384 - RNA, 21 nt, Artificial sequence
  specific aptamers
gguagugguguggaagcggug

SEQ ID NO: 5385 - RNA, 21 nt, Artificial sequence
  specific aptamers
gguagugguguggaaguggag

SEQ ID NO: 5386 - RNA, 21 nt, Artificial sequence
  specific aptamers
gguagugguguggaaguggcg

SEQ ID NO: 5387 - RNA, 21 nt, Artificial sequence
  specific aptamers
gguagugguguggaaguggug

SEQ ID NO: 5388 - RNA, 21 nt, Artificial sequence
  specific aptamers
gguagugguguggaugaggag

SEQ ID NO: 5389 - RNA, 21 nt, Artificial sequence
  specific aptamers
gguagugguguggaugaggcg

SEQ ID NO: 5390 - RNA, 21 nt, Artificial sequence
  specific aptamers
gguagugguguggaugaggug

SEQ ID NO: 5391 - RNA, 21 nt, Artificial sequence
  specific aptamers
gguagugguguggaugcggag

SEQ ID NO: 5392 - RNA, 21 nt, Artificial sequence
  specific aptamers
gguagugguguggaugcggcg

SEQ ID NO: 5393 - RNA, 21 nt, Artificial sequence
  specific aptamers
gguagugguguggaugcggug

SEQ ID NO: 5394 - RNA, 21 nt, Artificial sequence
  specific aptamers
gguagugguguggauguggag

SEQ ID NO: 5395 - RNA, 21 nt, Artificial sequence
  specific aptamers
gguagugguguggauguggcg

SEQ ID NO: 5396 - RNA, 21 nt, Artificial sequence
  specific aptamers
gguagugguguggauguggug

SEQ ID NO: 5397 - RNA, 20 nt, Artificial sequence
  specific aptamers
gguagugguguggagaggag

SEQ ID NO: 5398 - RNA, 20 nt, Artificial sequence
  specific aptamers
gguagugguguggagaggcg

SEQ ID NO: 5399 - RNA, 20 nt, Artificial sequence
  specific aptamers
gguagugguguggagaggug

SEQ ID NO: 5400 - RNA, 20 nt, Artificial sequence
  specific aptamers
gguagugguguggagcggag

SEQ ID NO: 5401 - RNA, 20 nt, Artificial sequence
  specific aptamers
gguagugguguggagcggcg

SEQ ID NO: 5402 - RNA, 20 nt, Artificial sequence
  specific aptamers
gguagugguguggagcggug

SEQ ID NO: 5403 - RNA, 20 nt, Artificial sequence
  specific aptamers
gguagugguguggaguggag

SEQ ID NO: 5404 - RNA, 20 nt, Artificial sequence
  specific aptamers
gguagugguguggaguggcg

SEQ ID NO: 5405 - RNA, 20 nt, Artificial sequence
  specific aptamers
gguagugguguggaguggug

SEQ ID NO: 5406 - RNA, 21 nt, Artificial sequence
  specific aptamers
gguaguggugugguagaggag

SEQ ID NO: 5407 - RNA, 21 nt, Artificial sequence
  specific aptamers
gguaguggugugguagaggcg

SEQ ID NO: 5408 - RNA, 21 nt, Artificial sequence
  specific aptamers
gguaguggugugguagaggug

SEQ ID NO: 5409 - RNA, 21 nt, Artificial sequence
  specific aptamers
gguaguggugugguagcggag

SEQ ID NO: 5410 - RNA, 21 nt, Artificial sequence
  specific aptamers
gguaguggugugguagcggcg

SEQ ID NO: 5411 - RNA, 21 nt, Artificial sequence
  specific aptamers
gguaguggugugguagcggug

SEQ ID NO: 5412 - RNA, 21 nt, Artificial sequence
  specific aptamers
gguaguggugugguaguggag

SEQ ID NO: 5413 - RNA, 21 nt, Artificial sequence
  specific aptamers
gguaguggugugguaguggcg

SEQ ID NO: 5414 - RNA, 21 nt, Artificial sequence
  specific aptamers
gguaguggugugguaguggug

SEQ ID NO: 5415 - RNA, 21 nt, Artificial sequence
  specific aptamers
gguaguggugugguugaggag

SEQ ID NO: 5416 - RNA, 21 nt, Artificial sequence
  specific aptamers
gguaguggugugguugaggcg

SEQ ID NO: 5417 - RNA, 21 nt, Artificial sequence
  specific aptamers
gguaguggugugguugaggug

SEQ ID NO: 5418 - RNA, 21 nt, Artificial sequence
  specific aptamers
gguaguggugugguugcggag

SEQ ID NO: 5419 - RNA, 21 nt, Artificial sequence
  specific aptamers
gguaguggugugguugcggcg

SEQ ID NO: 5420 - RNA, 21 nt, Artificial sequence
  specific aptamers
gguaguggugugguugcggug

SEQ ID NO: 5421 - RNA, 21 nt, Artificial sequence
  specific aptamers
gguaguggugugguuguggag

SEQ ID NO: 5422 - RNA, 21 nt, Artificial sequence
  specific aptamers
gguaguggugugguuguggcg

SEQ ID NO: 5423 - RNA, 21 nt, Artificial sequence
  specific aptamers
gguaguggugugguuguggug

SEQ ID NO: 5424 - RNA, 20 nt, Artificial sequence
  specific aptamers
gguagugguguggugaggag

SEQ ID NO: 5425 - RNA, 20 nt, Artificial sequence
  specific aptamers
gguagugguguggugaggcg

SEQ ID NO: 5426 - RNA, 20 nt, Artificial sequence
  specific aptamers
gguagugguguggugaggug

SEQ ID NO: 5427 - RNA, 20 nt, Artificial sequence
  specific aptamers
gguagugguguggugcggag

SEQ ID NO: 5428 - RNA, 20 nt, Artificial sequence
  specific aptamers
gguagugguguggugcggcg

SEQ ID NO: 5429 - RNA, 20 nt, Artificial sequence
  specific aptamers
gguagugguguggugcggug

SEQ ID NO: 5430 - RNA, 20 nt, Artificial sequence
  specific aptamers
gguaguggugugguguggag

SEQ ID NO: 5431 - RNA, 20 nt, Artificial sequence
  specific aptamers
gguaguggugugguguggcg

SEQ ID NO: 5432 - RNA, 20 nt, Artificial sequence
  specific aptamers
gguaguggugugguguggug

SEQ ID NO: 5433 - RNA, 21 nt, Artificial sequence
  specific aptamers
gguugaggagaggaagaggag

SEQ ID NO: 5434 - RNA, 21 nt, Artificial sequence
  specific aptamers
gguugaggagaggaagaggcg

SEQ ID NO: 5435 - RNA, 21 nt, Artificial sequence
  specific aptamers
gguugaggagaggaagaggug

SEQ ID NO: 5436 - RNA, 21 nt, Artificial sequence
  specific aptamers
gguugaggagaggaagcggag

SEQ ID NO: 5437 - RNA, 21 nt, Artificial sequence
  specific aptamers
gguugaggagaggaagcggcg

SEQ ID NO: 5438 - RNA, 21 nt, Artificial sequence
  specific aptamers
gguugaggagaggaagcggug

SEQ ID NO: 5439 - RNA, 21 nt, Artificial sequence
  specific aptamers
gguugaggagaggaaguggag

SEQ ID NO: 5440 - RNA, 21 nt, Artificial sequence
  specific aptamers
gguugaggagaggaaguggcg

SEQ ID NO: 5441 - RNA, 21 nt, Artificial sequence
  specific aptamers
gguugaggagaggaaguggug

SEQ ID NO: 5442 - RNA, 21 nt, Artificial sequence
  specific aptamers
gguugaggagaggaugaggag

SEQ ID NO: 5443 - RNA, 21 nt, Artificial sequence
  specific aptamers
gguugaggagaggaugaggcg

SEQ ID NO: 5444 - RNA, 21 nt, Artificial sequence
  specific aptamers
gguugaggagaggaugaggug

SEQ ID NO: 5445 - RNA, 21 nt, Artificial sequence
  specific aptamers
gguugaggagaggaugcggag

SEQ ID NO: 5446 - RNA, 21 nt, Artificial sequence
  specific aptamers
gguugaggagaggaugcggcg

SEQ ID NO: 5447 - RNA, 21 nt, Artificial sequence
  specific aptamers
gguugaggagaggaugcggug

SEQ ID NO: 5448 - RNA, 21 nt, Artificial sequence
  specific aptamers
gguugaggagaggauguggag

SEQ ID NO: 5449 - RNA, 21 nt, Artificial sequence
  specific aptamers
gguugaggagaggauguggcg

SEQ ID NO: 5450 - RNA, 21 nt, Artificial sequence
  specific aptamers
gguugaggagaggauguggug

SEQ ID NO: 5451 - RNA, 20 nt, Artificial sequence
  specific aptamers
gguugaggagaggagaggag

SEQ ID NO: 5452 - RNA, 20 nt, Artificial sequence
  specific aptamers
gguugaggagaggagaggcg

SEQ ID NO: 5453 - RNA, 20 nt, Artificial sequence
  specific aptamers
gguugaggagaggagaggug

SEQ ID NO: 5454 - RNA, 20 nt, Artificial sequence
  specific aptamers
gguugaggagaggagcggag

SEQ ID NO: 5455 - RNA, 20 nt, Artificial sequence
  specific aptamers
gguugaggagaggagcggcg

SEQ ID NO: 5456 - RNA, 20 nt, Artificial sequence
  specific aptamers
gguugaggagaggagcggug

SEQ ID NO: 5457 - RNA, 20 nt, Artificial sequence
  specific aptamers
gguugaggagaggaguggag

SEQ ID NO: 5458 - RNA, 20 nt, Artificial sequence
  specific aptamers
gguugaggagaggaguggcg

SEQ ID NO: 5459 - RNA, 20 nt, Artificial sequence
  specific aptamers
gguugaggagaggaguggug

SEQ ID NO: 5460 - RNA, 21 nt, Artificial sequence
  specific aptamers
gguugaggagagguagaggag

SEQ ID NO: 5461 - RNA, 21 nt, Artificial sequence
  specific aptamers
gguugaggagagguagaggcg

SEQ ID NO: 5462 - RNA, 21 nt, Artificial sequence
  specific aptamers
gguugaggagagguagaggug

SEQ ID NO: 5463 - RNA, 21 nt, Artificial sequence
  specific aptamers
gguugaggagagguagcggag

SEQ ID NO: 5464 - RNA, 21 nt, Artificial sequence
  specific aptamers
gguugaggagagguagcggcg

SEQ ID NO: 5465 - RNA, 21 nt, Artificial sequence
  specific aptamers
gguugaggagagguagcggug

SEQ ID NO: 5466 - RNA, 21 nt, Artificial sequence
  specific aptamers
gguugaggagagguaguggag

SEQ ID NO: 5467 - RNA, 21 nt, Artificial sequence
  specific aptamers
gguugaggagagguaguggcg

SEQ ID NO: 5468 - RNA, 21 nt, Artificial sequence
  specific aptamers
gguugaggagagguaguggug

SEQ ID NO: 5469 - RNA, 21 nt, Artificial sequence
  specific aptamers
gguugaggagagguugaggag

SEQ ID NO: 5470 - RNA, 21 nt, Artificial sequence
  specific aptamers
gguugaggagagguugaggcg

SEQ ID NO: 5471 - RNA, 21 nt, Artificial sequence
  specific aptamers
gguugaggagagguugaggug

SEQ ID NO: 5472 - RNA, 21 nt, Artificial sequence
  specific aptamers
gguugaggagagguugcggag

SEQ ID NO: 5473 - RNA, 21 nt, Artificial sequence
  specific aptamers
gguugaggagagguugcggcg

SEQ ID NO: 5474 - RNA, 21 nt, Artificial sequence
  specific aptamers
gguugaggagagguugcggug

SEQ ID NO: 5475 - RNA, 21 nt, Artificial sequence
  specific aptamers
gguugaggagagguuguggag

SEQ ID NO: 5476 - RNA, 21 nt, Artificial sequence
  specific aptamers
gguugaggagagguuguggcg

SEQ ID NO: 5477 - RNA, 21 nt, Artificial sequence
  specific aptamers
gguugaggagagguuguggug

SEQ ID NO: 5478 - RNA, 20 nt, Artificial sequence
  specific aptamers
gguugaggagaggugaggag

SEQ ID NO: 5479 - RNA, 20 nt, Artificial sequence
  specific aptamers
gguugaggagaggugaggcg

SEQ ID NO: 5480 - RNA, 20 nt, Artificial sequence
  specific aptamers
gguugaggagaggugaggug

SEQ ID NO: 5481 - RNA, 20 nt, Artificial sequence
  specific aptamers
gguugaggagaggugcggag

SEQ ID NO: 5482 - RNA, 20 nt, Artificial sequence
  specific aptamers
gguugaggagaggugcggcg

SEQ ID NO: 5483 - RNA, 20 nt, Artificial sequence
  specific aptamers
gguugaggagaggugcggug

SEQ ID NO: 5484 - RNA, 20 nt, Artificial sequence
  specific aptamers
gguugaggagagguguggag

SEQ ID NO: 5485 - RNA, 20 nt, Artificial sequence
  specific aptamers
gguugaggagagguguggcg

SEQ ID NO: 5486 - RNA, 20 nt, Artificial sequence
  specific aptamers
gguugaggagagguguggug

SEQ ID NO: 5487 - RNA, 21 nt, Artificial sequence
  specific aptamers
gguugaggaguggaagaggag

SEQ ID NO: 5488 - RNA, 21 nt, Artificial sequence
  specific aptamers
gguugaggaguggaagaggcg

SEQ ID NO: 5489 - RNA, 21 nt, Artificial sequence
  specific aptamers
gguugaggaguggaagaggug

SEQ ID NO: 5490 - RNA, 21 nt, Artificial sequence
  specific aptamers
gguugaggaguggaagcggag

SEQ ID NO: 5491 - RNA, 21 nt, Artificial sequence
  specific aptamers
gguugaggaguggaagcggcg

SEQ ID NO: 5492 - RNA, 21 nt, Artificial sequence
  specific aptamers
gguugaggaguggaagcggug

SEQ ID NO: 5493 - RNA, 21 nt, Artificial sequence
  specific aptamers
gguugaggaguggaaguggag

SEQ ID NO: 5494 - RNA, 21 nt, Artificial sequence
  specific aptamers
gguugaggaguggaaguggcg

SEQ ID NO: 5495 - RNA, 21 nt, Artificial sequence
  specific aptamers
gguugaggaguggaaguggug

SEQ ID NO: 5496 - RNA, 21 nt, Artificial sequence
  specific aptamers
gguugaggaguggaugaggag

SEQ ID NO: 5497 - RNA, 21 nt, Artificial sequence
  specific aptamers
gguugaggaguggaugaggcg

SEQ ID NO: 5498 - RNA, 21 nt, Artificial sequence
  specific aptamers
gguugaggaguggaugaggug

SEQ ID NO: 5499 - RNA, 21 nt, Artificial sequence
  specific aptamers
gguugaggaguggaugcggag

SEQ ID NO: 5500 - RNA, 21 nt, Artificial sequence
  specific aptamers
gguugaggaguggaugcggcg

SEQ ID NO: 5501 - RNA, 21 nt, Artificial sequence
  specific aptamers
gguugaggaguggaugcggug

SEQ ID NO: 5502 - RNA, 21 nt, Artificial sequence
  specific aptamers
gguugaggaguggauguggag

SEQ ID NO: 5503 - RNA, 21 nt, Artificial sequence
  specific aptamers
gguugaggaguggauguggcg

SEQ ID NO: 5504 - RNA, 21 nt, Artificial sequence
  specific aptamers
gguugaggaguggauguggug

SEQ ID NO: 5505 - RNA, 20 nt, Artificial sequence
  specific aptamers
gguugaggaguggagaggag

SEQ ID NO: 5506 - RNA, 20 nt, Artificial sequence
  specific aptamers
gguugaggaguggagaggcg

SEQ ID NO: 5507 - RNA, 20 nt, Artificial sequence
  specific aptamers
gguugaggaguggagaggug

SEQ ID NO: 5508 - RNA, 20 nt, Artificial sequence
  specific aptamers
gguugaggaguggagcggag

SEQ ID NO: 5509 - RNA, 20 nt, Artificial sequence
  specific aptamers
gguugaggaguggagcggcg

SEQ ID NO: 5510 - RNA, 20 nt, Artificial sequence
  specific aptamers
gguugaggaguggagcggug

SEQ ID NO: 5511 - RNA, 20 nt, Artificial sequence
  specific aptamers
gguugaggaguggaguggag

SEQ ID NO: 5512 - RNA, 20 nt, Artificial sequence
  specific aptamers
gguugaggaguggaguggcg

SEQ ID NO: 5513 - RNA, 20 nt, Artificial sequence
  specific aptamers
gguugaggaguggaguggug

SEQ ID NO: 5514 - RNA, 21 nt, Artificial sequence
  specific aptamers
gguugaggagugguagaggag

SEQ ID NO: 5515 - RNA, 21 nt, Artificial sequence
  specific aptamers
gguugaggagugguagaggcg

SEQ ID NO: 5516 - RNA, 21 nt, Artificial sequence
  specific aptamers
gguugaggagugguagaggug

SEQ ID NO: 5517 - RNA, 21 nt, Artificial sequence
  specific aptamers
gguugaggagugguagcggag

SEQ ID NO: 5518 - RNA, 21 nt, Artificial sequence
  specific aptamers
gguugaggagugguagcggcg

SEQ ID NO: 5519 - RNA, 21 nt, Artificial sequence
  specific aptamers
gguugaggagugguagcggug

SEQ ID NO: 5520 - RNA, 21 nt, Artificial sequence
  specific aptamers
gguugaggagugguaguggag

SEQ ID NO: 5521 - RNA, 21 nt, Artificial sequence
  specific aptamers
gguugaggagugguaguggcg

SEQ ID NO: 5522 - RNA, 21 nt, Artificial sequence
  specific aptamers
gguugaggagugguaguggug

SEQ ID NO: 5523 - RNA, 21 nt, Artificial sequence
  specific aptamers
gguugaggagugguugaggag

SEQ ID NO: 5524 - RNA, 21 nt, Artificial sequence
  specific aptamers
gguugaggagugguugaggcg

SEQ ID NO: 5525 - RNA, 21 nt, Artificial sequence
  specific aptamers
gguugaggagugguugaggug

SEQ ID NO: 5526 - RNA, 21 nt, Artificial sequence
  specific aptamers
gguugaggagugguugcggag

SEQ ID NO: 5527 - RNA, 21 nt, Artificial sequence
  specific aptamers
gguugaggagugguugcggcg

SEQ ID NO: 5528 - RNA, 21 nt, Artificial sequence
  specific aptamers
gguugaggagugguugcggug

SEQ ID NO: 5529 - RNA, 21 nt, Artificial sequence
  specific aptamers
gguugaggagugguuguggag

SEQ ID NO: 5530 - RNA, 21 nt, Artificial sequence
  specific aptamers
gguugaggagugguuguggcg

SEQ ID NO: 5531 - RNA, 21 nt, Artificial sequence
  specific aptamers
gguugaggagugguuguggug

SEQ ID NO: 5532 - RNA, 20 nt, Artificial sequence
  specific aptamers
gguugaggaguggugaggag

SEQ ID NO: 5533 - RNA, 20 nt, Artificial sequence
  specific aptamers
gguugaggaguggugaggcg

SEQ ID NO: 5534 - RNA, 20 nt, Artificial sequence
  specific aptamers
gguugaggaguggugaggug

SEQ ID NO: 5535 - RNA, 20 nt, Artificial sequence
  specific aptamers
gguugaggaguggugcggag

SEQ ID NO: 5536 - RNA, 20 nt, Artificial sequence
  specific aptamers
gguugaggaguggugcggcg

SEQ ID NO: 5537 - RNA, 20 nt, Artificial sequence
  specific aptamers
gguugaggaguggugcggug

SEQ ID NO: 5538 - RNA, 20 nt, Artificial sequence
  specific aptamers
gguugaggagugguguggag

SEQ ID NO: 5539 - RNA, 20 nt, Artificial sequence
  specific aptamers
gguugaggagugguguggcg

SEQ ID NO: 5540 - RNA, 20 nt, Artificial sequence
  specific aptamers
gguugaggagugguguggug

SEQ ID NO: 5541 - RNA, 21 nt, Artificial sequence
  specific aptamers
gguugaggugaggaagaggag

SEQ ID NO: 5542 - RNA, 21 nt, Artificial sequence
  specific aptamers
gguugaggugaggaagaggcg

SEQ ID NO: 5543 - RNA, 21 nt, Artificial sequence
  specific aptamers
gguugaggugaggaagaggug

SEQ ID NO: 5544 - RNA, 21 nt, Artificial sequence
  specific aptamers
gguugaggugaggaagcggag

SEQ ID NO: 5545 - RNA, 21 nt, Artificial sequence
  specific aptamers
gguugaggugaggaagcggcg

SEQ ID NO: 5546 - RNA, 21 nt, Artificial sequence
  specific aptamers
gguugaggugaggaagcggug

SEQ ID NO: 5547 - RNA, 21 nt, Artificial sequence
  specific aptamers
gguugaggugaggaaguggag

SEQ ID NO: 5548 - RNA, 21 nt, Artificial sequence
  specific aptamers
gguugaggugaggaaguggcg

SEQ ID NO: 5549 - RNA, 21 nt, Artificial sequence
  specific aptamers
gguugaggugaggaaguggug

SEQ ID NO: 5550 - RNA, 21 nt, Artificial sequence
  specific aptamers
gguugaggugaggaugaggag

SEQ ID NO: 5551 - RNA, 21 nt, Artificial sequence
  specific aptamers
gguugaggugaggaugaggcg

SEQ ID NO: 5552 - RNA, 21 nt, Artificial sequence
  specific aptamers
gguugaggugaggaugaggug

SEQ ID NO: 5553 - RNA, 21 nt, Artificial sequence
  specific aptamers
gguugaggugaggaugcggag

SEQ ID NO: 5554 - RNA, 21 nt, Artificial sequence
  specific aptamers
gguugaggugaggaugcggcg

SEQ ID NO: 5555 - RNA, 21 nt, Artificial sequence
  specific aptamers
gguugaggugaggaugcggug

SEQ ID NO: 5556 - RNA, 21 nt, Artificial sequence
  specific aptamers
gguugaggugaggauguggag

SEQ ID NO: 5557 - RNA, 21 nt, Artificial sequence
  specific aptamers
gguugaggugaggauguggcg

SEQ ID NO: 5558 - RNA, 21 nt, Artificial sequence
  specific aptamers
gguugaggugaggauguggug

SEQ ID NO: 5559 - RNA, 20 nt, Artificial sequence
  specific aptamers
gguugaggugaggagaggag

SEQ ID NO: 5560 - RNA, 20 nt, Artificial sequence
  specific aptamers
gguugaggugaggagaggcg

SEQ ID NO: 5561 - RNA, 20 nt, Artificial sequence
  specific aptamers
gguugaggugaggagaggug

SEQ ID NO: 5562 - RNA, 20 nt, Artificial sequence
  specific aptamers
gguugaggugaggagcggag

SEQ ID NO: 5563 - RNA, 20 nt, Artificial sequence
  specific aptamers
gguugaggugaggagcggcg

SEQ ID NO: 5564 - RNA, 20 nt, Artificial sequence
  specific aptamers
gguugaggugaggagcggug

SEQ ID NO: 5565 - RNA, 20 nt, Artificial sequence
  specific aptamers
gguugaggugaggaguggag

SEQ ID NO: 5566 - RNA, 20 nt, Artificial sequence
  specific aptamers
gguugaggugaggaguggcg

SEQ ID NO: 5567 - RNA, 20 nt, Artificial sequence
  specific aptamers
gguugaggugaggaguggug

SEQ ID NO: 5568 - RNA, 21 nt, Artificial sequence
  specific aptamers
gguugaggugagguagaggag

SEQ ID NO: 5569 - RNA, 21 nt, Artificial sequence
  specific aptamers
gguugaggugagguagaggcg

SEQ ID NO: 5570 - RNA, 21 nt, Artificial sequence
  specific aptamers
gguugaggugagguagaggug

SEQ ID NO: 5571 - RNA, 21 nt, Artificial sequence
  specific aptamers
gguugaggugagguagcggag

SEQ ID NO: 5572 - RNA, 21 nt, Artificial sequence
  specific aptamers
gguugaggugagguagcggcg

SEQ ID NO: 5573 - RNA, 21 nt, Artificial sequence
  specific aptamers
gguugaggugagguagcggug

SEQ ID NO: 5574 - RNA, 21 nt, Artificial sequence
  specific aptamers
gguugaggugagguaguggag

SEQ ID NO: 5575 - RNA, 21 nt, Artificial sequence
  specific aptamers
gguugaggugagguaguggcg

SEQ ID NO: 5576 - RNA, 21 nt, Artificial sequence
  specific aptamers
gguugaggugagguaguggug

SEQ ID NO: 5577 - RNA, 21 nt, Artificial sequence
  specific aptamers
gguugaggugagguugaggag

SEQ ID NO: 5578 - RNA, 21 nt, Artificial sequence
  specific aptamers
gguugaggugagguugaggcg

SEQ ID NO: 5579 - RNA, 21 nt, Artificial sequence
  specific aptamers
gguugaggugagguugaggug

SEQ ID NO: 5580 - RNA, 21 nt, Artificial sequence
  specific aptamers
gguugaggugagguugcggag

SEQ ID NO: 5581 - RNA, 21 nt, Artificial sequence
  specific aptamers
gguugaggugagguugcggcg

SEQ ID NO: 5582 - RNA, 21 nt, Artificial sequence
  specific aptamers
gguugaggugagguugcggug

SEQ ID NO: 5583 - RNA, 21 nt, Artificial sequence
  specific aptamers
gguugaggugagguuguggag

SEQ ID NO: 5584 - RNA, 21 nt, Artificial sequence
  specific aptamers
gguugaggugagguuguggcg

SEQ ID NO: 5585 - RNA, 21 nt, Artificial sequence
  specific aptamers
gguugaggugagguuguggug

SEQ ID NO: 5586 - RNA, 20 nt, Artificial sequence
  specific aptamers
gguugaggugaggugaggag

SEQ ID NO: 5587 - RNA, 20 nt, Artificial sequence
  specific aptamers
gguugaggugaggugaggcg

SEQ ID NO: 5588 - RNA, 20 nt, Artificial sequence
  specific aptamers
gguugaggugaggugaggug

SEQ ID NO: 5589 - RNA, 20 nt, Artificial sequence
  specific aptamers
gguugaggugaggugcggag

SEQ ID NO: 5590 - RNA, 20 nt, Artificial sequence
  specific aptamers
gguugaggugaggugcggcg

SEQ ID NO: 5591 - RNA, 20 nt, Artificial sequence
  specific aptamers
gguugaggugaggugcggug

SEQ ID NO: 5592 - RNA, 20 nt, Artificial sequence
  specific aptamers
gguugaggugagguguggag

SEQ ID NO: 5593 - RNA, 20 nt, Artificial sequence
  specific aptamers
gguugaggugagguguggcg

SEQ ID NO: 5594 - RNA, 20 nt, Artificial sequence
  specific aptamers
gguugaggugagguguggug

SEQ ID NO: 5595 - RNA, 21 nt, Artificial sequence
  specific aptamers
gguugagguguggaagaggag

SEQ ID NO: 5596 - RNA, 21 nt, Artificial sequence
  specific aptamers
gguugagguguggaagaggcg

SEQ ID NO: 5597 - RNA, 21 nt, Artificial sequence
  specific aptamers
gguugagguguggaagaggug

SEQ ID NO: 5598 - RNA, 21 nt, Artificial sequence
  specific aptamers
gguugagguguggaagcggag

SEQ ID NO: 5599 - RNA, 21 nt, Artificial sequence
  specific aptamers
gguugagguguggaagcggcg

SEQ ID NO: 5600 - RNA, 21 nt, Artificial sequence
  specific aptamers
gguugagguguggaagcggug

SEQ ID NO: 5601 - RNA, 21 nt, Artificial sequence
  specific aptamers
gguugagguguggaaguggag

SEQ ID NO: 5602 - RNA, 21 nt, Artificial sequence
  specific aptamers
gguugagguguggaaguggcg

SEQ ID NO: 5603 - RNA, 21 nt, Artificial sequence
  specific aptamers
gguugagguguggaaguggug

SEQ ID NO: 5604 - RNA, 21 nt, Artificial sequence
  specific aptamers
gguugagguguggaugaggag

SEQ ID NO: 5605 - RNA, 21 nt, Artificial sequence
  specific aptamers
gguugagguguggaugaggcg

SEQ ID NO: 5606 - RNA, 21 nt, Artificial sequence
  specific aptamers
gguugagguguggaugaggug

SEQ ID NO: 5607 - RNA, 21 nt, Artificial sequence
  specific aptamers
gguugagguguggaugcggag

SEQ ID NO: 5608 - RNA, 21 nt, Artificial sequence
  specific aptamers
gguugagguguggaugcggcg

SEQ ID NO: 5609 - RNA, 21 nt, Artificial sequence
  specific aptamers
gguugagguguggaugcggug

SEQ ID NO: 5610 - RNA, 21 nt, Artificial sequence
  specific aptamers
gguugagguguggauguggag

SEQ ID NO: 5611 - RNA, 21 nt, Artificial sequence
  specific aptamers
gguugagguguggauguggcg

SEQ ID NO: 5612 - RNA, 21 nt, Artificial sequence
  specific aptamers
gguugagguguggauguggug

SEQ ID NO: 5613 - RNA, 20 nt, Artificial sequence
  specific aptamers
gguugagguguggagaggag

SEQ ID NO: 5614 - RNA, 20 nt, Artificial sequence
  specific aptamers
gguugagguguggagaggcg

SEQ ID NO: 5615 - RNA, 20 nt, Artificial sequence
  specific aptamers
gguugagguguggagaggug

SEQ ID NO: 5616 - RNA, 20 nt, Artificial sequence
  specific aptamers
gguugagguguggagcggag

SEQ ID NO: 5617 - RNA, 20 nt, Artificial sequence
  specific aptamers
gguugagguguggagcggcg

SEQ ID NO: 5618 - RNA, 20 nt, Artificial sequence
  specific aptamers
gguugagguguggagcggug

SEQ ID NO: 5619 - RNA, 20 nt, Artificial sequence
  specific aptamers
gguugagguguggaguggag

SEQ ID NO: 5620 - RNA, 20 nt, Artificial sequence
  specific aptamers
gguugagguguggaguggcg

SEQ ID NO: 5621 - RNA, 20 nt, Artificial sequence
  specific aptamers
gguugagguguggaguggug

SEQ ID NO: 5622 - RNA, 21 nt, Artificial sequence
  specific aptamers
gguugaggugugguagaggag

SEQ ID NO: 5623 - RNA, 21 nt, Artificial sequence
  specific aptamers
gguugaggugugguagaggcg

SEQ ID NO: 5624 - RNA, 21 nt, Artificial sequence
  specific aptamers
gguugaggugugguagaggug

SEQ ID NO: 5625 - RNA, 21 nt, Artificial sequence
  specific aptamers
gguugaggugugguagcggag

SEQ ID NO: 5626 - RNA, 21 nt, Artificial sequence
  specific aptamers
gguugaggugugguagcggcg

SEQ ID NO: 5627 - RNA, 21 nt, Artificial sequence
  specific aptamers
gguugaggugugguagcggug

SEQ ID NO: 5628 - RNA, 21 nt, Artificial sequence
  specific aptamers
gguugaggugugguaguggag

SEQ ID NO: 5629 - RNA, 21 nt, Artificial sequence
  specific aptamers
gguugaggugugguaguggcg

SEQ ID NO: 5630 - RNA, 21 nt, Artificial sequence
  specific aptamers
gguugaggugugguaguggug

SEQ ID NO: 5631 - RNA, 21 nt, Artificial sequence
  specific aptamers
gguugaggugugguugaggag

SEQ ID NO: 5632 - RNA, 21 nt, Artificial sequence
  specific aptamers
gguugaggugugguugaggcg

SEQ ID NO: 5633 - RNA, 21 nt, Artificial sequence
  specific aptamers
gguugaggugugguugaggug

SEQ ID NO: 5634 - RNA, 21 nt, Artificial sequence
  specific aptamers
gguugaggugugguugcggag

SEQ ID NO: 5635 - RNA, 21 nt, Artificial sequence
  specific aptamers
gguugaggugugguugcggcg

SEQ ID NO: 5636 - RNA, 21 nt, Artificial sequence
  specific aptamers
gguugaggugugguugcggug

SEQ ID NO: 5637 - RNA, 21 nt, Artificial sequence
  specific aptamers
gguugaggugugguuguggag

SEQ ID NO: 5638 - RNA, 21 nt, Artificial sequence
  specific aptamers
gguugaggugugguuguggcg

SEQ ID NO: 5639 - RNA, 21 nt, Artificial sequence
  specific aptamers
gguugaggugugguuguggug

SEQ ID NO: 5640 - RNA, 20 nt, Artificial sequence
  specific aptamers
gguugagguguggugaggag

SEQ ID NO: 5641 - RNA, 20 nt, Artificial sequence
  specific aptamers
gguugagguguggugaggcg

SEQ ID NO: 5642 - RNA, 20 nt, Artificial sequence
  specific aptamers
gguugagguguggugaggug

SEQ ID NO: 5643 - RNA, 20 nt, Artificial sequence
  specific aptamers
gguugagguguggugcggag

SEQ ID NO: 5644 - RNA, 20 nt, Artificial sequence
  specific aptamers
gguugagguguggugcggcg

SEQ ID NO: 5645 - RNA, 20 nt, Artificial sequence
  specific aptamers
gguugagguguggugcggug

SEQ ID NO: 5646 - RNA, 20 nt, Artificial sequence
  specific aptamers
gguugaggugugguguggag

SEQ ID NO: 5647 - RNA, 20 nt, Artificial sequence
  specific aptamers
gguugaggugugguguggcg

SEQ ID NO: 5648 - RNA, 20 nt, Artificial sequence
  specific aptamers
gguugaggugugguguggug

SEQ ID NO: 5649 - RNA, 21 nt, Artificial sequence
  specific aptamers
gguuguggagaggaagaggag

SEQ ID NO: 5650 - RNA, 21 nt, Artificial sequence
  specific aptamers
gguuguggagaggaagaggcg

SEQ ID NO: 5651 - RNA, 21 nt, Artificial sequence
  specific aptamers
gguuguggagaggaagaggug

SEQ ID NO: 5652 - RNA, 21 nt, Artificial sequence
  specific aptamers
gguuguggagaggaagcggag

SEQ ID NO: 5653 - RNA, 21 nt, Artificial sequence
  specific aptamers
gguuguggagaggaagcggcg

SEQ ID NO: 5654 - RNA, 21 nt, Artificial sequence
  specific aptamers
gguuguggagaggaagcggug

SEQ ID NO: 5655 - RNA, 21 nt, Artificial sequence
  specific aptamers
gguuguggagaggaaguggag

SEQ ID NO: 5656 - RNA, 21 nt, Artificial sequence
  specific aptamers
gguuguggagaggaaguggcg

SEQ ID NO: 5657 - RNA, 21 nt, Artificial sequence
  specific aptamers
gguuguggagaggaaguggug

SEQ ID NO: 5658 - RNA, 21 nt, Artificial sequence
  specific aptamers
gguuguggagaggaugaggag

SEQ ID NO: 5659 - RNA, 21 nt, Artificial sequence
  specific aptamers
gguuguggagaggaugaggcg

SEQ ID NO: 5660 - RNA, 21 nt, Artificial sequence
  specific aptamers
gguuguggagaggaugaggug

SEQ ID NO: 5661 - RNA, 21 nt, Artificial sequence
  specific aptamers
gguuguggagaggaugcggag

SEQ ID NO: 5662 - RNA, 21 nt, Artificial sequence
  specific aptamers
gguuguggagaggaugcggcg

SEQ ID NO: 5663 - RNA, 21 nt, Artificial sequence
  specific aptamers
gguuguggagaggaugcggug

SEQ ID NO: 5664 - RNA, 21 nt, Artificial sequence
  specific aptamers
gguuguggagaggauguggag

SEQ ID NO: 5665 - RNA, 21 nt, Artificial sequence
  specific aptamers
gguuguggagaggauguggcg

SEQ ID NO: 5666 - RNA, 21 nt, Artificial sequence
  specific aptamers
gguuguggagaggauguggug

SEQ ID NO: 5667 - RNA, 20 nt, Artificial sequence
  specific aptamers
gguuguggagaggagaggag

SEQ ID NO: 5668 - RNA, 20 nt, Artificial sequence
  specific aptamers
gguuguggagaggagaggcg

SEQ ID NO: 5669 - RNA, 20 nt, Artificial sequence
  specific aptamers
gguuguggagaggagaggug

SEQ ID NO: 5670 - RNA, 20 nt, Artificial sequence
  specific aptamers
gguuguggagaggagcggag

SEQ ID NO: 5671 - RNA, 20 nt, Artificial sequence
  specific aptamers
gguuguggagaggagcggcg

SEQ ID NO: 5672 - RNA, 20 nt, Artificial sequence
  specific aptamers
gguuguggagaggagcggug

SEQ ID NO: 5673 - RNA, 20 nt, Artificial sequence
  specific aptamers
gguuguggagaggaguggag

SEQ ID NO: 5674 - RNA, 20 nt, Artificial sequence
  specific aptamers
gguuguggagaggaguggcg

SEQ ID NO: 5675 - RNA, 20 nt, Artificial sequence
  specific aptamers
gguuguggagaggaguggug

SEQ ID NO: 5676 - RNA, 21 nt, Artificial sequence
  specific aptamers
gguuguggagagguagaggag

SEQ ID NO: 5677 - RNA, 21 nt, Artificial sequence
  specific aptamers
gguuguggagagguagaggcg

SEQ ID NO: 5678 - RNA, 21 nt, Artificial sequence
  specific aptamers
gguuguggagagguagaggug

SEQ ID NO: 5679 - RNA, 21 nt, Artificial sequence
  specific aptamers
gguuguggagagguagcggag

SEQ ID NO: 5680 - RNA, 21 nt, Artificial sequence
  specific aptamers
gguuguggagagguagcggcg

SEQ ID NO: 5681 - RNA, 21 nt, Artificial sequence
  specific aptamers
gguuguggagagguagcggug

SEQ ID NO: 5682 - RNA, 21 nt, Artificial sequence
  specific aptamers
gguuguggagagguaguggag

SEQ ID NO: 5683 - RNA, 21 nt, Artificial sequence
  specific aptamers
gguuguggagagguaguggcg

SEQ ID NO: 5684 - RNA, 21 nt, Artificial sequence
  specific aptamers
gguuguggagagguaguggug

SEQ ID NO: 5685 - RNA, 21 nt, Artificial sequence
  specific aptamers
gguuguggagagguugaggag

SEQ ID NO: 5686 - RNA, 21 nt, Artificial sequence
  specific aptamers
gguuguggagagguugaggcg

SEQ ID NO: 5687 - RNA, 21 nt, Artificial sequence
  specific aptamers
gguuguggagagguugaggug

SEQ ID NO: 5688 - RNA, 21 nt, Artificial sequence
  specific aptamers
gguuguggagagguugcggag

SEQ ID NO: 5689 - RNA, 21 nt, Artificial sequence
  specific aptamers
gguuguggagagguugcggcg

SEQ ID NO: 5690 - RNA, 21 nt, Artificial sequence
  specific aptamers
gguuguggagagguugcggug

SEQ ID NO: 5691 - RNA, 21 nt, Artificial sequence
  specific aptamers
gguuguggagagguuguggag

SEQ ID NO: 5692 - RNA, 21 nt, Artificial sequence
  specific aptamers
gguuguggagagguuguggcg

SEQ ID NO: 5693 - RNA, 21 nt, Artificial sequence
  specific aptamers
gguuguggagagguuguggug

SEQ ID NO: 5694 - RNA, 20 nt, Artificial sequence
  specific aptamers
gguuguggagaggugaggag

SEQ ID NO: 5695 - RNA, 20 nt, Artificial sequence
  specific aptamers
gguuguggagaggugaggcg

SEQ ID NO: 5696 - RNA, 20 nt, Artificial sequence
  specific aptamers
gguuguggagaggugaggug

SEQ ID NO: 5697 - RNA, 20 nt, Artificial sequence
  specific aptamers
gguuguggagaggugcggag

SEQ ID NO: 5698 - RNA, 20 nt, Artificial sequence
  specific aptamers
gguuguggagaggugcggcg

SEQ ID NO: 5699 - RNA, 20 nt, Artificial sequence
  specific aptamers
gguuguggagaggugcggug

SEQ ID NO: 5700 - RNA, 20 nt, Artificial sequence
  specific aptamers
gguuguggagagguguggag

SEQ ID NO: 5701 - RNA, 20 nt, Artificial sequence
  specific aptamers
gguuguggagagguguggcg

SEQ ID NO: 5702 - RNA, 20 nt, Artificial sequence
  specific aptamers
gguuguggagagguguggug

SEQ ID NO: 5703 - RNA, 21 nt, Artificial sequence
  specific aptamers
gguuguggaguggaagaggag

SEQ ID NO: 5704 - RNA, 21 nt, Artificial sequence
  specific aptamers
gguuguggaguggaagaggcg

SEQ ID NO: 5705 - RNA, 21 nt, Artificial sequence
  specific aptamers
gguuguggaguggaagaggug

SEQ ID NO: 5706 - RNA, 21 nt, Artificial sequence
  specific aptamers
gguuguggaguggaagcggag

SEQ ID NO: 5707 - RNA, 21 nt, Artificial sequence
  specific aptamers
gguuguggaguggaagcggcg

SEQ ID NO: 5708 - RNA, 21 nt, Artificial sequence
  specific aptamers
gguuguggaguggaagcggug

SEQ ID NO: 5709 - RNA, 21 nt, Artificial sequence
  specific aptamers
gguuguggaguggaaguggag

SEQ ID NO: 5710 - RNA, 21 nt, Artificial sequence
  specific aptamers
gguuguggaguggaaguggcg

SEQ ID NO: 5711 - RNA, 21 nt, Artificial sequence
  specific aptamers
gguuguggaguggaaguggug

SEQ ID NO: 5712 - RNA, 21 nt, Artificial sequence
  specific aptamers
gguuguggaguggaugaggag

SEQ ID NO: 5713 - RNA, 21 nt, Artificial sequence
  specific aptamers
gguuguggaguggaugaggcg

SEQ ID NO: 5714 - RNA, 21 nt, Artificial sequence
  specific aptamers
gguuguggaguggaugaggug

SEQ ID NO: 5715 - RNA, 21 nt, Artificial sequence
  specific aptamers
gguuguggaguggaugcggag

SEQ ID NO: 5716 - RNA, 21 nt, Artificial sequence
  specific aptamers
gguuguggaguggaugcggcg

SEQ ID NO: 5717 - RNA, 21 nt, Artificial sequence
  specific aptamers
gguuguggaguggaugcggug

SEQ ID NO: 5718 - RNA, 21 nt, Artificial sequence
  specific aptamers
gguuguggaguggauguggag

SEQ ID NO: 5719 - RNA, 21 nt, Artificial sequence
  specific aptamers
gguuguggaguggauguggcg

SEQ ID NO: 5720 - RNA, 21 nt, Artificial sequence
  specific aptamers
gguuguggaguggauguggug

SEQ ID NO: 5721 - RNA, 20 nt, Artificial sequence
  specific aptamers
gguuguggaguggagaggag

SEQ ID NO: 5722 - RNA, 20 nt, Artificial sequence
  specific aptamers
gguuguggaguggagaggcg

SEQ ID NO: 5723 - RNA, 20 nt, Artificial sequence
  specific aptamers
gguuguggaguggagaggug

SEQ ID NO: 5724 - RNA, 20 nt, Artificial sequence
  specific aptamers
gguuguggaguggagcggag

SEQ ID NO: 5725 - RNA, 20 nt, Artificial sequence
  specific aptamers
gguuguggaguggagcggcg

SEQ ID NO: 5726 - RNA, 20 nt, Artificial sequence
  specific aptamers
gguuguggaguggagcggug

SEQ ID NO: 5727 - RNA, 20 nt, Artificial sequence
  specific aptamers
gguuguggaguggaguggag

SEQ ID NO: 5728 - RNA, 20 nt, Artificial sequence
  specific aptamers
gguuguggaguggaguggcg

SEQ ID NO: 5729 - RNA, 20 nt, Artificial sequence
  specific aptamers
gguuguggaguggaguggug

SEQ ID NO: 5730 - RNA, 21 nt, Artificial sequence
  specific aptamers
gguuguggagugguagaggag

SEQ ID NO: 5731 - RNA, 21 nt, Artificial sequence
  specific aptamers
gguuguggagugguagaggcg

SEQ ID NO: 5732 - RNA, 21 nt, Artificial sequence
  specific aptamers
gguuguggagugguagaggug

SEQ ID NO: 5733 - RNA, 21 nt, Artificial sequence
  specific aptamers
gguuguggagugguagcggag

SEQ ID NO: 5734 - RNA, 21 nt, Artificial sequence
  specific aptamers
gguuguggagugguagcggcg

SEQ ID NO: 5735 - RNA, 21 nt, Artificial sequence
  specific aptamers
gguuguggagugguagcggug

SEQ ID NO: 5736 - RNA, 21 nt, Artificial sequence
  specific aptamers
gguuguggagugguaguggag

SEQ ID NO: 5737 - RNA, 21 nt, Artificial sequence
  specific aptamers
gguuguggagugguaguggcg

SEQ ID NO: 5738 - RNA, 21 nt, Artificial sequence
  specific aptamers
gguuguggagugguaguggug

SEQ ID NO: 5739 - RNA, 21 nt, Artificial sequence
  specific aptamers
gguuguggagugguugaggag

SEQ ID NO: 5740 - RNA, 21 nt, Artificial sequence
  specific aptamers
gguuguggagugguugaggcg

SEQ ID NO: 5741 - RNA, 21 nt, Artificial sequence
  specific aptamers
gguuguggagugguugaggug

SEQ ID NO: 5742 - RNA, 21 nt, Artificial sequence
  specific aptamers
gguuguggagugguugcggag

SEQ ID NO: 5743 - RNA, 21 nt, Artificial sequence
  specific aptamers
gguuguggagugguugcggcg

SEQ ID NO: 5744 - RNA, 21 nt, Artificial sequence
  specific aptamers
gguuguggagugguugcggug

SEQ ID NO: 5745 - RNA, 21 nt, Artificial sequence
  specific aptamers
gguuguggagugguuguggag

SEQ ID NO: 5746 - RNA, 21 nt, Artificial sequence
  specific aptamers
gguuguggagugguuguggcg

SEQ ID NO: 5747 - RNA, 21 nt, Artificial sequence
  specific aptamers
gguuguggagugguuguggug

SEQ ID NO: 5748 - RNA, 20 nt, Artificial sequence
  specific aptamers
gguuguggaguggugaggag

SEQ ID NO: 5749 - RNA, 20 nt, Artificial sequence
  specific aptamers
gguuguggaguggugaggcg

SEQ ID NO: 5750 - RNA, 20 nt, Artificial sequence
  specific aptamers
gguuguggaguggugaggug

SEQ ID NO: 5751 - RNA, 20 nt, Artificial sequence
  specific aptamers
gguuguggaguggugcggag

SEQ ID NO: 5752 - RNA, 20 nt, Artificial sequence
  specific aptamers
gguuguggaguggugcggcg

SEQ ID NO: 5753 - RNA, 20 nt, Artificial sequence
  specific aptamers
gguuguggaguggugcggug

SEQ ID NO: 5754 - RNA, 20 nt, Artificial sequence
  specific aptamers
gguuguggagugguguggag

SEQ ID NO: 5755 - RNA, 20 nt, Artificial sequence
  specific aptamers
gguuguggagugguguggcg

SEQ ID NO: 5756 - RNA, 20 nt, Artificial sequence
  specific aptamers
gguuguggagugguguggug

SEQ ID NO: 5757 - RNA, 21 nt, Artificial sequence
  specific aptamers
gguuguggugaggaagaggag

SEQ ID NO: 5758 - RNA, 21 nt, Artificial sequence
  specific aptamers
gguuguggugaggaagaggcg

SEQ ID NO: 5759 - RNA, 21 nt, Artificial sequence
  specific aptamers
gguuguggugaggaagaggug

SEQ ID NO: 5760 - RNA, 21 nt, Artificial sequence
  specific aptamers
gguuguggugaggaagcggag

SEQ ID NO: 5761 - RNA, 21 nt, Artificial sequence
  specific aptamers
gguuguggugaggaagcggcg

SEQ ID NO: 5762 - RNA, 21 nt, Artificial sequence
  specific aptamers
gguuguggugaggaagcggug

SEQ ID NO: 5763 - RNA, 21 nt, Artificial sequence
  specific aptamers
gguuguggugaggaaguggag

SEQ ID NO: 5764 - RNA, 21 nt, Artificial sequence
  specific aptamers
gguuguggugaggaaguggcg

SEQ ID NO: 5765 - RNA, 21 nt, Artificial sequence
  specific aptamers
gguuguggugaggaaguggug

SEQ ID NO: 5766 - RNA, 21 nt, Artificial sequence
  specific aptamers
gguuguggugaggaugaggag

SEQ ID NO: 5767 - RNA, 21 nt, Artificial sequence
  specific aptamers
gguuguggugaggaugaggcg

SEQ ID NO: 5768 - RNA, 21 nt, Artificial sequence
  specific aptamers
gguuguggugaggaugaggug

SEQ ID NO: 5769 - RNA, 21 nt, Artificial sequence
  specific aptamers
gguuguggugaggaugcggag

SEQ ID NO: 5770 - RNA, 21 nt, Artificial sequence
  specific aptamers
gguuguggugaggaugcggcg

SEQ ID NO: 5771 - RNA, 21 nt, Artificial sequence
  specific aptamers
gguuguggugaggaugcggug

SEQ ID NO: 5772 - RNA, 21 nt, Artificial sequence
  specific aptamers
gguuguggugaggauguggag

SEQ ID NO: 5773 - RNA, 21 nt, Artificial sequence
  specific aptamers
gguuguggugaggauguggcg

SEQ ID NO: 5774 - RNA, 21 nt, Artificial sequence
  specific aptamers
gguuguggugaggauguggug

SEQ ID NO: 5775 - RNA, 20 nt, Artificial sequence
  specific aptamers
gguuguggugaggagaggag

SEQ ID NO: 5776 - RNA, 20 nt, Artificial sequence
  specific aptamers
gguuguggugaggagaggcg

SEQ ID NO: 5777 - RNA, 20 nt, Artificial sequence
  specific aptamers
gguuguggugaggagaggug

SEQ ID NO: 5778 - RNA, 20 nt, Artificial sequence
  specific aptamers
gguuguggugaggagcggag

SEQ ID NO: 5779 - RNA, 20 nt, Artificial sequence
  specific aptamers
gguuguggugaggagcggcg

SEQ ID NO: 5780 - RNA, 20 nt, Artificial sequence
  specific aptamers
gguuguggugaggagcggug

SEQ ID NO: 5781 - RNA, 20 nt, Artificial sequence
  specific aptamers
gguuguggugaggaguggag

SEQ ID NO: 5782 - RNA, 20 nt, Artificial sequence
  specific aptamers
gguuguggugaggaguggcg

SEQ ID NO: 5783 - RNA, 20 nt, Artificial sequence
  specific aptamers
gguuguggugaggaguggug

SEQ ID NO: 5784 - RNA, 21 nt, Artificial sequence
  specific aptamers
gguuguggugagguagaggag

SEQ ID NO: 5785 - RNA, 21 nt, Artificial sequence
  specific aptamers
gguuguggugagguagaggcg

SEQ ID NO: 5786 - RNA, 21 nt, Artificial sequence
  specific aptamers
gguuguggugagguagaggug

SEQ ID NO: 5787 - RNA, 21 nt, Artificial sequence
  specific aptamers
gguuguggugagguagcggag

SEQ ID NO: 5788 - RNA, 21 nt, Artificial sequence
  specific aptamers
gguuguggugagguagcggcg

SEQ ID NO: 5789 - RNA, 21 nt, Artificial sequence
  specific aptamers
gguuguggugagguagcggug

SEQ ID NO: 5790 - RNA, 21 nt, Artificial sequence
  specific aptamers
gguuguggugagguaguggag

SEQ ID NO: 5791 - RNA, 21 nt, Artificial sequence
  specific aptamers
gguuguggugagguaguggcg

SEQ ID NO: 5792 - RNA, 21 nt, Artificial sequence
  specific aptamers
gguuguggugagguaguggug

SEQ ID NO: 5793 - RNA, 21 nt, Artificial sequence
  specific aptamers
gguuguggugagguugaggag

SEQ ID NO: 5794 - RNA, 21 nt, Artificial sequence
  specific aptamers
gguuguggugagguugaggcg

SEQ ID NO: 5795 - RNA, 21 nt, Artificial sequence
  specific aptamers
gguuguggugagguugaggug

SEQ ID NO: 5796 - RNA, 21 nt, Artificial sequence
  specific aptamers
gguuguggugagguugcggag

SEQ ID NO: 5797 - RNA, 21 nt, Artificial sequence
  specific aptamers
gguuguggugagguugcggcg

SEQ ID NO: 5798 - RNA, 21 nt, Artificial sequence
  specific aptamers
gguuguggugagguugcggug

SEQ ID NO: 5799 - RNA, 21 nt, Artificial sequence
  specific aptamers
gguuguggugagguuguggag

SEQ ID NO: 5800 - RNA, 21 nt, Artificial sequence
  specific aptamers
gguuguggugagguuguggcg

SEQ ID NO: 5801 - RNA, 21 nt, Artificial sequence
  specific aptamers
gguuguggugagguuguggug

SEQ ID NO: 5802 - RNA, 20 nt, Artificial sequence
  specific aptamers
gguuguggugaggugaggag

SEQ ID NO: 5803 - RNA, 20 nt, Artificial sequence
  specific aptamers
gguuguggugaggugaggcg

SEQ ID NO: 5804 - RNA, 20 nt, Artificial sequence
  specific aptamers
gguuguggugaggugaggug

SEQ ID NO: 5805 - RNA, 20 nt, Artificial sequence
  specific aptamers
gguuguggugaggugcggag

SEQ ID NO: 5806 - RNA, 20 nt, Artificial sequence
  specific aptamers
gguuguggugaggugcggcg

SEQ ID NO: 5807 - RNA, 20 nt, Artificial sequence
  specific aptamers
gguuguggugaggugcggug

SEQ ID NO: 5808 - RNA, 20 nt, Artificial sequence
  specific aptamers
gguuguggugagguguggag

SEQ ID NO: 5809 - RNA, 20 nt, Artificial sequence
  specific aptamers
gguuguggugagguguggcg

SEQ ID NO: 5810 - RNA, 20 nt, Artificial sequence
  specific aptamers
gguuguggugagguguggug

SEQ ID NO: 5811 - RNA, 21 nt, Artificial sequence
  specific aptamers
gguugugguguggaagaggag

SEQ ID NO: 5812 - RNA, 21 nt, Artificial sequence
  specific aptamers
gguugugguguggaagaggcg

SEQ ID NO: 5813 - RNA, 21 nt, Artificial sequence
  specific aptamers
gguugugguguggaagaggug

SEQ ID NO: 5814 - RNA, 21 nt, Artificial sequence
  specific aptamers
gguugugguguggaagcggag

SEQ ID NO: 5815 - RNA, 21 nt, Artificial sequence
  specific aptamers
gguugugguguggaagcggcg

SEQ ID NO: 5816 - RNA, 21 nt, Artificial sequence
  specific aptamers
gguugugguguggaagcggug

SEQ ID NO: 5817 - RNA, 21 nt, Artificial sequence
  specific aptamers
gguugugguguggaaguggag

SEQ ID NO: 5818 - RNA, 21 nt, Artificial sequence
  specific aptamers
gguugugguguggaaguggcg

SEQ ID NO: 5819 - RNA, 21 nt, Artificial sequence
  specific aptamers
gguugugguguggaaguggug

SEQ ID NO: 5820 - RNA, 21 nt, Artificial sequence
  specific aptamers
gguugugguguggaugaggag

SEQ ID NO: 5821 - RNA, 21 nt, Artificial sequence
  specific aptamers
gguugugguguggaugaggcg

SEQ ID NO: 5822 - RNA, 21 nt, Artificial sequence
  specific aptamers
gguugugguguggaugaggug

SEQ ID NO: 5823 - RNA, 21 nt, Artificial sequence
  specific aptamers
gguugugguguggaugcggag

SEQ ID NO: 5824 - RNA, 21 nt, Artificial sequence
  specific aptamers
gguugugguguggaugcggcg

SEQ ID NO: 5825 - RNA, 21 nt, Artificial sequence
  specific aptamers
gguugugguguggaugcggug

SEQ ID NO: 5826 - RNA, 21 nt, Artificial sequence
  specific aptamers
gguugugguguggauguggag

SEQ ID NO: 5827 - RNA, 21 nt, Artificial sequence
  specific aptamers
gguugugguguggauguggcg

SEQ ID NO: 5828 - RNA, 21 nt, Artificial sequence
  specific aptamers
gguugugguguggauguggug

SEQ ID NO: 5829 - RNA, 20 nt, Artificial sequence
  specific aptamers
gguugugguguggagaggag

SEQ ID NO: 5830 - RNA, 20 nt, Artificial sequence
  specific aptamers
gguugugguguggagaggcg

SEQ ID NO: 5831 - RNA, 20 nt, Artificial sequence
  specific aptamers
gguugugguguggagaggug

SEQ ID NO: 5832 - RNA, 20 nt, Artificial sequence
  specific aptamers
gguugugguguggagcggag

SEQ ID NO: 5833 - RNA, 20 nt, Artificial sequence
  specific aptamers
gguugugguguggagcggcg

SEQ ID NO: 5834 - RNA, 20 nt, Artificial sequence
  specific aptamers
gguugugguguggagcggug

SEQ ID NO: 5835 - RNA, 20 nt, Artificial sequence
  specific aptamers
gguugugguguggaguggag

SEQ ID NO: 5836 - RNA, 20 nt, Artificial sequence
  specific aptamers
gguugugguguggaguggcg

SEQ ID NO: 5837 - RNA, 20 nt, Artificial sequence
  specific aptamers
gguugugguguggaguggug

SEQ ID NO: 5838 - RNA, 21 nt, Artificial sequence
  specific aptamers
gguuguggugugguagaggag

SEQ ID NO: 5839 - RNA, 21 nt, Artificial sequence
  specific aptamers
gguuguggugugguagaggcg

SEQ ID NO: 5840 - RNA, 21 nt, Artificial sequence
  specific aptamers
gguuguggugugguagaggug

SEQ ID NO: 5841 - RNA, 21 nt, Artificial sequence
  specific aptamers
gguuguggugugguagcggag

SEQ ID NO: 5842 - RNA, 21 nt, Artificial sequence
  specific aptamers
gguuguggugugguagcggcg

SEQ ID NO: 5843 - RNA, 21 nt, Artificial sequence
  specific aptamers
gguuguggugugguagcggug

SEQ ID NO: 5844 - RNA, 21 nt, Artificial sequence
  specific aptamers
gguuguggugugguaguggag

SEQ ID NO: 5845 - RNA, 21 nt, Artificial sequence
  specific aptamers
gguuguggugugguaguggcg

SEQ ID NO: 5846 - RNA, 21 nt, Artificial sequence
  specific aptamers
gguuguggugugguaguggug

SEQ ID NO: 5847 - RNA, 21 nt, Artificial sequence
  specific aptamers
gguuguggugugguugaggag

SEQ ID NO: 5848 - RNA, 21 nt, Artificial sequence
  specific aptamers
gguuguggugugguugaggcg

SEQ ID NO: 5849 - RNA, 21 nt, Artificial sequence
  specific aptamers
gguuguggugugguugaggug

SEQ ID NO: 5850 - RNA, 21 nt, Artificial sequence
  specific aptamers
gguuguggugugguugcggag

SEQ ID NO: 5851 - RNA, 21 nt, Artificial sequence
  specific aptamers
gguuguggugugguugcggcg

SEQ ID NO: 5852 - RNA, 21 nt, Artificial sequence
  specific aptamers
gguuguggugugguugcggug

SEQ ID NO: 5853 - RNA, 21 nt, Artificial sequence
  specific aptamers
gguuguggugugguuguggag

SEQ ID NO: 5854 - RNA, 21 nt, Artificial sequence
  specific aptamers
gguuguggugugguuguggcg

SEQ ID NO: 5855 - RNA, 21 nt, Artificial sequence
  specific aptamers
gguuguggugugguuguggug

SEQ ID NO: 5856 - RNA, 20 nt, Artificial sequence
  specific aptamers
gguugugguguggugaggag

SEQ ID NO: 5857 - RNA, 20 nt, Artificial sequence
  specific aptamers
gguugugguguggugaggcg

SEQ ID NO: 5858 - RNA, 20 nt, Artificial sequence
  specific aptamers
gguugugguguggugaggug

SEQ ID NO: 5859 - RNA, 20 nt, Artificial sequence
  specific aptamers
gguugugguguggugcggag

SEQ ID NO: 5860 - RNA, 20 nt, Artificial sequence
  specific aptamers
gguugugguguggugcggcg

SEQ ID NO: 5861 - RNA, 20 nt, Artificial sequence
  specific aptamers
gguugugguguggugcggug

SEQ ID NO: 5862 - RNA, 20 nt, Artificial sequence
  specific aptamers
gguuguggugugguguggag

SEQ ID NO: 5863 - RNA, 20 nt, Artificial sequence
  specific aptamers
gguuguggugugguguggcg

SEQ ID NO: 5864 - RNA, 20 nt, Artificial sequence
  specific aptamers
gguuguggugugguguggug

SEQ ID NO: 5865 - RNA, 20 nt, Artificial sequence
  specific aptamers
ggagaggagaggaagaggag

SEQ ID NO: 5866 - RNA, 20 nt, Artificial sequence
  specific aptamers
ggagaggagaggaagaggcg

SEQ ID NO: 5867 - RNA, 20 nt, Artificial sequence
  specific aptamers
ggagaggagaggaagaggug

SEQ ID NO: 5868 - RNA, 20 nt, Artificial sequence
  specific aptamers
ggagaggagaggaagcggag

SEQ ID NO: 5869 - RNA, 20 nt, Artificial sequence
  specific aptamers
ggagaggagaggaagcggcg

SEQ ID NO: 5870 - RNA, 20 nt, Artificial sequence
  specific aptamers
ggagaggagaggaagcggug

SEQ ID NO: 5871 - RNA, 20 nt, Artificial sequence
  specific aptamers
ggagaggagaggaaguggag

SEQ ID NO: 5872 - RNA, 20 nt, Artificial sequence
  specific aptamers
ggagaggagaggaaguggcg

SEQ ID NO: 5873 - RNA, 20 nt, Artificial sequence
  specific aptamers
ggagaggagaggaaguggug

SEQ ID NO: 5874 - RNA, 20 nt, Artificial sequence
  specific aptamers
ggagaggagaggaugaggag

SEQ ID NO: 5875 - RNA, 20 nt, Artificial sequence
  specific aptamers
ggagaggagaggaugaggcg

SEQ ID NO: 5876 - RNA, 20 nt, Artificial sequence
  specific aptamers
ggagaggagaggaugaggug

SEQ ID NO: 5877 - RNA, 20 nt, Artificial sequence
  specific aptamers
ggagaggagaggaugcggag

SEQ ID NO: 5878 - RNA, 20 nt, Artificial sequence
  specific aptamers
ggagaggagaggaugcggcg

SEQ ID NO: 5879 - RNA, 20 nt, Artificial sequence
  specific aptamers
ggagaggagaggaugcggug

SEQ ID NO: 5880 - RNA, 20 nt, Artificial sequence
  specific aptamers
ggagaggagaggauguggag

SEQ ID NO: 5881 - RNA, 20 nt, Artificial sequence
  specific aptamers
ggagaggagaggauguggcg

SEQ ID NO: 5882 - RNA, 20 nt, Artificial sequence
  specific aptamers
ggagaggagaggauguggug

SEQ ID NO: 5883 - RNA, 19 nt, Artificial sequence
  specific aptamers
ggagaggagaggagaggag

SEQ ID NO: 5884 - RNA, 19 nt, Artificial sequence
  specific aptamers
ggagaggagaggagaggcg

SEQ ID NO: 5885 - RNA, 19 nt, Artificial sequence
  specific aptamers
ggagaggagaggagaggug

SEQ ID NO: 5886 - RNA, 19 nt, Artificial sequence
  specific aptamers
ggagaggagaggagcggag

SEQ ID NO: 5887 - RNA, 19 nt, Artificial sequence
  specific aptamers
ggagaggagaggagcggcg

SEQ ID NO: 5888 - RNA, 19 nt, Artificial sequence
  specific aptamers
ggagaggagaggagcggug

SEQ ID NO: 5889 - RNA, 19 nt, Artificial sequence
  specific aptamers
ggagaggagaggaguggag

SEQ ID NO: 5890 - RNA, 19 nt, Artificial sequence
  specific aptamers
ggagaggagaggaguggcg

SEQ ID NO: 5891 - RNA, 19 nt, Artificial sequence
  specific aptamers
ggagaggagaggaguggug

SEQ ID NO: 5892 - RNA, 20 nt, Artificial sequence
  specific aptamers
ggagaggagagguagaggag

SEQ ID NO: 5893 - RNA, 20 nt, Artificial sequence
  specific aptamers
ggagaggagagguagaggcg

SEQ ID NO: 5894 - RNA, 20 nt, Artificial sequence
  specific aptamers
ggagaggagagguagaggug

SEQ ID NO: 5895 - RNA, 20 nt, Artificial sequence
  specific aptamers
ggagaggagagguagcggag

SEQ ID NO: 5896 - RNA, 20 nt, Artificial sequence
  specific aptamers
ggagaggagagguagcggcg

SEQ ID NO: 5897 - RNA, 20 nt, Artificial sequence
  specific aptamers
ggagaggagagguagcggug

SEQ ID NO: 5898 - RNA, 20 nt, Artificial sequence
  specific aptamers
ggagaggagagguaguggag

SEQ ID NO: 5899 - RNA, 20 nt, Artificial sequence
  specific aptamers
ggagaggagagguaguggcg

SEQ ID NO: 5900 - RNA, 20 nt, Artificial sequence
  specific aptamers
ggagaggagagguaguggug

SEQ ID NO: 5901 - RNA, 20 nt, Artificial sequence
  specific aptamers
ggagaggagagguugaggag

SEQ ID NO: 5902 - RNA, 20 nt, Artificial sequence
  specific aptamers
ggagaggagagguugaggcg

SEQ ID NO: 5903 - RNA, 20 nt, Artificial sequence
  specific aptamers
ggagaggagagguugaggug

SEQ ID NO: 5904 - RNA, 20 nt, Artificial sequence
  specific aptamers
ggagaggagagguugcggag

SEQ ID NO: 5905 - RNA, 20 nt, Artificial sequence
  specific aptamers
ggagaggagagguugcggcg

SEQ ID NO: 5906 - RNA, 20 nt, Artificial sequence
  specific aptamers
ggagaggagagguugcggug

SEQ ID NO: 5907 - RNA, 20 nt, Artificial sequence
  specific aptamers
ggagaggagagguuguggag

SEQ ID NO: 5908 - RNA, 20 nt, Artificial sequence
  specific aptamers
ggagaggagagguuguggcg

SEQ ID NO: 5909 - RNA, 20 nt, Artificial sequence
  specific aptamers
ggagaggagagguuguggug

SEQ ID NO: 5910 - RNA, 19 nt, Artificial sequence
  specific aptamers
ggagaggagaggugaggag

SEQ ID NO: 5911 - RNA, 19 nt, Artificial sequence
  specific aptamers
ggagaggagaggugaggcg

SEQ ID NO: 5912 - RNA, 19 nt, Artificial sequence
  specific aptamers
ggagaggagaggugaggug

SEQ ID NO: 5913 - RNA, 19 nt, Artificial sequence
  specific aptamers
ggagaggagaggugcggag

SEQ ID NO: 5914 - RNA, 19 nt, Artificial sequence
  specific aptamers
ggagaggagaggugcggcg

SEQ ID NO: 5915 - RNA, 19 nt, Artificial sequence
  specific aptamers
ggagaggagaggugcggug

SEQ ID NO: 5916 - RNA, 19 nt, Artificial sequence
  specific aptamers
ggagaggagagguguggag

SEQ ID NO: 5917 - RNA, 19 nt, Artificial sequence
  specific aptamers
ggagaggagagguguggcg

SEQ ID NO: 5918 - RNA, 19 nt, Artificial sequence
  specific aptamers
ggagaggagagguguggug

SEQ ID NO: 5919 - RNA, 20 nt, Artificial sequence
  specific aptamers
ggagaggaguggaagaggag

SEQ ID NO: 5920 - RNA, 20 nt, Artificial sequence
  specific aptamers
ggagaggaguggaagaggcg

SEQ ID NO: 5921 - RNA, 20 nt, Artificial sequence
  specific aptamers
ggagaggaguggaagaggug

SEQ ID NO: 5922 - RNA, 20 nt, Artificial sequence
  specific aptamers
ggagaggaguggaagcggag

SEQ ID NO: 5923 - RNA, 20 nt, Artificial sequence
  specific aptamers
ggagaggaguggaagcggcg

SEQ ID NO: 5924 - RNA, 20 nt, Artificial sequence
  specific aptamers
ggagaggaguggaagcggug

SEQ ID NO: 5925 - RNA, 20 nt, Artificial sequence
  specific aptamers
ggagaggaguggaaguggag

SEQ ID NO: 5926 - RNA, 20 nt, Artificial sequence
  specific aptamers
ggagaggaguggaaguggcg

SEQ ID NO: 5927 - RNA, 20 nt, Artificial sequence
  specific aptamers
ggagaggaguggaaguggug

SEQ ID NO: 5928 - RNA, 20 nt, Artificial sequence
  specific aptamers
ggagaggaguggaugaggag

SEQ ID NO: 5929 - RNA, 20 nt, Artificial sequence
  specific aptamers
ggagaggaguggaugaggcg

SEQ ID NO: 5930 - RNA, 20 nt, Artificial sequence
  specific aptamers
ggagaggaguggaugaggug

SEQ ID NO: 5931 - RNA, 20 nt, Artificial sequence
  specific aptamers
ggagaggaguggaugcggag

SEQ ID NO: 5932 - RNA, 20 nt, Artificial sequence
  specific aptamers
ggagaggaguggaugcggcg

SEQ ID NO: 5933 - RNA, 20 nt, Artificial sequence
  specific aptamers
ggagaggaguggaugcggug

SEQ ID NO: 5934 - RNA, 20 nt, Artificial sequence
  specific aptamers
ggagaggaguggauguggag

SEQ ID NO: 5935 - RNA, 20 nt, Artificial sequence
  specific aptamers
ggagaggaguggauguggcg

SEQ ID NO: 5936 - RNA, 20 nt, Artificial sequence
  specific aptamers
ggagaggaguggauguggug

SEQ ID NO: 5937 - RNA, 19 nt, Artificial sequence
  specific aptamers
ggagaggaguggagaggag

SEQ ID NO: 5938 - RNA, 19 nt, Artificial sequence
  specific aptamers
ggagaggaguggagaggcg

SEQ ID NO: 5939 - RNA, 19 nt, Artificial sequence
  specific aptamers
ggagaggaguggagaggug

SEQ ID NO: 5940 - RNA, 19 nt, Artificial sequence
  specific aptamers
ggagaggaguggagcggag

SEQ ID NO: 5941 - RNA, 19 nt, Artificial sequence
  specific aptamers
ggagaggaguggagcggcg

SEQ ID NO: 5942 - RNA, 19 nt, Artificial sequence
  specific aptamers
ggagaggaguggagcggug

SEQ ID NO: 5943 - RNA, 19 nt, Artificial sequence
  specific aptamers
ggagaggaguggaguggag

SEQ ID NO: 5944 - RNA, 19 nt, Artificial sequence
  specific aptamers
ggagaggaguggaguggcg

SEQ ID NO: 5945 - RNA, 19 nt, Artificial sequence
  specific aptamers
ggagaggaguggaguggug

SEQ ID NO: 5946 - RNA, 20 nt, Artificial sequence
  specific aptamers
ggagaggagugguagaggag

SEQ ID NO: 5947 - RNA, 20 nt, Artificial sequence
  specific aptamers
ggagaggagugguagaggcg

SEQ ID NO: 5948 - RNA, 20 nt, Artificial sequence
  specific aptamers
ggagaggagugguagaggug

SEQ ID NO: 5949 - RNA, 20 nt, Artificial sequence
  specific aptamers
ggagaggagugguagcggag

SEQ ID NO: 5950 - RNA, 20 nt, Artificial sequence
  specific aptamers
ggagaggagugguagcggcg

SEQ ID NO: 5951 - RNA, 20 nt, Artificial sequence
  specific aptamers
ggagaggagugguagcggug

SEQ ID NO: 5952 - RNA, 20 nt, Artificial sequence
  specific aptamers
ggagaggagugguaguggag

SEQ ID NO: 5953 - RNA, 20 nt, Artificial sequence
  specific aptamers
ggagaggagugguaguggcg

SEQ ID NO: 5954 - RNA, 20 nt, Artificial sequence
  specific aptamers
ggagaggagugguaguggug

SEQ ID NO: 5955 - RNA, 20 nt, Artificial sequence
  specific aptamers
ggagaggagugguugaggag

SEQ ID NO: 5956 - RNA, 20 nt, Artificial sequence
  specific aptamers
ggagaggagugguugaggcg

SEQ ID NO: 5957 - RNA, 20 nt, Artificial sequence
  specific aptamers
ggagaggagugguugaggug

SEQ ID NO: 5958 - RNA, 20 nt, Artificial sequence
  specific aptamers
ggagaggagugguugcggag

SEQ ID NO: 5959 - RNA, 20 nt, Artificial sequence
  specific aptamers
ggagaggagugguugcggcg

SEQ ID NO: 5960 - RNA, 20 nt, Artificial sequence
  specific aptamers
ggagaggagugguugcggug

SEQ ID NO: 5961 - RNA, 20 nt, Artificial sequence
  specific aptamers
ggagaggagugguuguggag

SEQ ID NO: 5962 - RNA, 20 nt, Artificial sequence
  specific aptamers
ggagaggagugguuguggcg

SEQ ID NO: 5963 - RNA, 20 nt, Artificial sequence
  specific aptamers
ggagaggagugguuguggug

SEQ ID NO: 5964 - RNA, 19 nt, Artificial sequence
  specific aptamers
ggagaggaguggugaggag

SEQ ID NO: 5965 - RNA, 19 nt, Artificial sequence
  specific aptamers
ggagaggaguggugaggcg

SEQ ID NO: 5966 - RNA, 19 nt, Artificial sequence
  specific aptamers
ggagaggaguggugaggug

SEQ ID NO: 5967 - RNA, 19 nt, Artificial sequence
  specific aptamers
ggagaggaguggugcggag

SEQ ID NO: 5968 - RNA, 19 nt, Artificial sequence
  specific aptamers
ggagaggaguggugcggcg

SEQ ID NO: 5969 - RNA, 19 nt, Artificial sequence
  specific aptamers
ggagaggaguggugcggug

SEQ ID NO: 5970 - RNA, 19 nt, Artificial sequence
  specific aptamers
ggagaggagugguguggag

SEQ ID NO: 5971 - RNA, 19 nt, Artificial sequence
  specific aptamers
ggagaggagugguguggcg

SEQ ID NO: 5972 - RNA, 19 nt, Artificial sequence
  specific aptamers
ggagaggagugguguggug

SEQ ID NO: 5973 - RNA, 20 nt, Artificial sequence
  specific aptamers
ggagaggugaggaagaggag

SEQ ID NO: 5974 - RNA, 20 nt, Artificial sequence
  specific aptamers
ggagaggugaggaagaggcg

SEQ ID NO: 5975 - RNA, 20 nt, Artificial sequence
  specific aptamers
ggagaggugaggaagaggug

SEQ ID NO: 5976 - RNA, 20 nt, Artificial sequence
  specific aptamers
ggagaggugaggaagcggag

SEQ ID NO: 5977 - RNA, 20 nt, Artificial sequence
  specific aptamers
ggagaggugaggaagcggcg

SEQ ID NO: 5978 - RNA, 20 nt, Artificial sequence
  specific aptamers
ggagaggugaggaagcggug

SEQ ID NO: 5979 - RNA, 20 nt, Artificial sequence
  specific aptamers
ggagaggugaggaaguggag

SEQ ID NO: 5980 - RNA, 20 nt, Artificial sequence
  specific aptamers
ggagaggugaggaaguggcg

SEQ ID NO: 5981 - RNA, 20 nt, Artificial sequence
  specific aptamers
ggagaggugaggaaguggug

SEQ ID NO: 5982 - RNA, 20 nt, Artificial sequence
  specific aptamers
ggagaggugaggaugaggag

SEQ ID NO: 5983 - RNA, 20 nt, Artificial sequence
  specific aptamers
ggagaggugaggaugaggcg

SEQ ID NO: 5984 - RNA, 20 nt, Artificial sequence
  specific aptamers
ggagaggugaggaugaggug

SEQ ID NO: 5985 - RNA, 20 nt, Artificial sequence
  specific aptamers
ggagaggugaggaugcggag

SEQ ID NO: 5986 - RNA, 20 nt, Artificial sequence
  specific aptamers
ggagaggugaggaugcggcg

SEQ ID NO: 5987 - RNA, 20 nt, Artificial sequence
  specific aptamers
ggagaggugaggaugcggug

SEQ ID NO: 5988 - RNA, 20 nt, Artificial sequence
  specific aptamers
ggagaggugaggauguggag

SEQ ID NO: 5989 - RNA, 20 nt, Artificial sequence
  specific aptamers
ggagaggugaggauguggcg

SEQ ID NO: 5990 - RNA, 20 nt, Artificial sequence
  specific aptamers
ggagaggugaggauguggug

SEQ ID NO: 5991 - RNA, 19 nt, Artificial sequence
  specific aptamers
ggagaggugaggagaggag

SEQ ID NO: 5992 - RNA, 19 nt, Artificial sequence
  specific aptamers
ggagaggugaggagaggcg

SEQ ID NO: 5993 - RNA, 19 nt, Artificial sequence
  specific aptamers
ggagaggugaggagaggug

SEQ ID NO: 5994 - RNA, 19 nt, Artificial sequence
  specific aptamers
ggagaggugaggagcggag

SEQ ID NO: 5995 - RNA, 19 nt, Artificial sequence
  specific aptamers
ggagaggugaggagcggcg

SEQ ID NO: 5996 - RNA, 19 nt, Artificial sequence
  specific aptamers
ggagaggugaggagcggug

SEQ ID NO: 5997 - RNA, 19 nt, Artificial sequence
  specific aptamers
ggagaggugaggaguggag

SEQ ID NO: 5998 - RNA, 19 nt, Artificial sequence
  specific aptamers
ggagaggugaggaguggcg

SEQ ID NO: 5999 - RNA, 19 nt, Artificial sequence
  specific aptamers
ggagaggugaggaguggug

SEQ ID NO: 6000 - RNA, 20 nt, Artificial sequence
  specific aptamers
ggagaggugagguagaggag

SEQ ID NO: 6001 - RNA, 20 nt, Artificial sequence
  specific aptamers
ggagaggugagguagaggcg

SEQ ID NO: 6002 - RNA, 20 nt, Artificial sequence
  specific aptamers
ggagaggugagguagaggug

SEQ ID NO: 6003 - RNA, 20 nt, Artificial sequence
  specific aptamers
ggagaggugagguagcggag

SEQ ID NO: 6004 - RNA, 20 nt, Artificial sequence
  specific aptamers
ggagaggugagguagcggcg

SEQ ID NO: 6005 - RNA, 20 nt, Artificial sequence
  specific aptamers
ggagaggugagguagcggug

SEQ ID NO: 6006 - RNA, 20 nt, Artificial sequence
  specific aptamers
ggagaggugagguaguggag

SEQ ID NO: 6007 - RNA, 20 nt, Artificial sequence
  specific aptamers
ggagaggugagguaguggcg

SEQ ID NO: 6008 - RNA, 20 nt, Artificial sequence
  specific aptamers
ggagaggugagguaguggug

SEQ ID NO: 6009 - RNA, 20 nt, Artificial sequence
  specific aptamers
ggagaggugagguugaggag

SEQ ID NO: 6010 - RNA, 20 nt, Artificial sequence
  specific aptamers
ggagaggugagguugaggcg

SEQ ID NO: 6011 - RNA, 20 nt, Artificial sequence
  specific aptamers
ggagaggugagguugaggug

SEQ ID NO: 6012 - RNA, 20 nt, Artificial sequence
  specific aptamers
ggagaggugagguugcggag

SEQ ID NO: 6013 - RNA, 20 nt, Artificial sequence
  specific aptamers
ggagaggugagguugcggcg

SEQ ID NO: 6014 - RNA, 20 nt, Artificial sequence
  specific aptamers
ggagaggugagguugcggug

SEQ ID NO: 6015 - RNA, 20 nt, Artificial sequence
  specific aptamers
ggagaggugagguuguggag

SEQ ID NO: 6016 - RNA, 20 nt, Artificial sequence
  specific aptamers
ggagaggugagguuguggcg

SEQ ID NO: 6017 - RNA, 20 nt, Artificial sequence
  specific aptamers
ggagaggugagguuguggug

SEQ ID NO: 6018 - RNA, 19 nt, Artificial sequence
  specific aptamers
ggagaggugaggugaggag

SEQ ID NO: 6019 - RNA, 19 nt, Artificial sequence
  specific aptamers
ggagaggugaggugaggcg

SEQ ID NO: 6020 - RNA, 19 nt, Artificial sequence
  specific aptamers
ggagaggugaggugaggug

SEQ ID NO: 6021 - RNA, 19 nt, Artificial sequence
  specific aptamers
ggagaggugaggugcggag

SEQ ID NO: 6022 - RNA, 19 nt, Artificial sequence
  specific aptamers
ggagaggugaggugcggcg

SEQ ID NO: 6023 - RNA, 19 nt, Artificial sequence
  specific aptamers
ggagaggugaggugcggug

SEQ ID NO: 6024 - RNA, 19 nt, Artificial sequence
  specific aptamers
ggagaggugagguguggag

SEQ ID NO: 6025 - RNA, 19 nt, Artificial sequence
  specific aptamers
ggagaggugagguguggcg

SEQ ID NO: 6026 - RNA, 19 nt, Artificial sequence
  specific aptamers
ggagaggugagguguggug

SEQ ID NO: 6027 - RNA, 20 nt, Artificial sequence
  specific aptamers
ggagagguguggaagaggag

SEQ ID NO: 6028 - RNA, 20 nt, Artificial sequence
  specific aptamers
ggagagguguggaagaggcg

SEQ ID NO: 6029 - RNA, 20 nt, Artificial sequence
  specific aptamers
ggagagguguggaagaggug

SEQ ID NO: 6030 - RNA, 20 nt, Artificial sequence
  specific aptamers
ggagagguguggaagcggag

SEQ ID NO: 6031 - RNA, 20 nt, Artificial sequence
  specific aptamers
ggagagguguggaagcggcg

SEQ ID NO: 6032 - RNA, 20 nt, Artificial sequence
  specific aptamers
ggagagguguggaagcggug

SEQ ID NO: 6033 - RNA, 20 nt, Artificial sequence
  specific aptamers
ggagagguguggaaguggag

SEQ ID NO: 6034 - RNA, 20 nt, Artificial sequence
  specific aptamers
ggagagguguggaaguggcg

SEQ ID NO: 6035 - RNA, 20 nt, Artificial sequence
  specific aptamers
ggagagguguggaaguggug

SEQ ID NO: 6036 - RNA, 20 nt, Artificial sequence
  specific aptamers
ggagagguguggaugaggag

SEQ ID NO: 6037 - RNA, 20 nt, Artificial sequence
  specific aptamers
ggagagguguggaugaggcg

SEQ ID NO: 6038 - RNA, 20 nt, Artificial sequence
  specific aptamers
ggagagguguggaugaggug

SEQ ID NO: 6039 - RNA, 20 nt, Artificial sequence
  specific aptamers
ggagagguguggaugcggag

SEQ ID NO: 6040 - RNA, 20 nt, Artificial sequence
  specific aptamers
ggagagguguggaugcggcg

SEQ ID NO: 6041 - RNA, 20 nt, Artificial sequence
  specific aptamers
ggagagguguggaugcggug

SEQ ID NO: 6042 - RNA, 20 nt, Artificial sequence
  specific aptamers
ggagagguguggauguggag

SEQ ID NO: 6043 - RNA, 20 nt, Artificial sequence
  specific aptamers
ggagagguguggauguggcg

SEQ ID NO: 6044 - RNA, 20 nt, Artificial sequence
  specific aptamers
ggagagguguggauguggug

SEQ ID NO: 6045 - RNA, 19 nt, Artificial sequence
  specific aptamers
ggagagguguggagaggag

SEQ ID NO: 6046 - RNA, 19 nt, Artificial sequence
  specific aptamers
ggagagguguggagaggcg

SEQ ID NO: 6047 - RNA, 19 nt, Artificial sequence
  specific aptamers
ggagagguguggagaggug

SEQ ID NO: 6048 - RNA, 19 nt, Artificial sequence
  specific aptamers
ggagagguguggagcggag

SEQ ID NO: 6049 - RNA, 19 nt, Artificial sequence
  specific aptamers
ggagagguguggagcggcg

SEQ ID NO: 6050 - RNA, 19 nt, Artificial sequence
  specific aptamers
ggagagguguggagcggug

SEQ ID NO: 6051 - RNA, 19 nt, Artificial sequence
  specific aptamers
ggagagguguggaguggag

SEQ ID NO: 6052 - RNA, 19 nt, Artificial sequence
  specific aptamers
ggagagguguggaguggcg

SEQ ID NO: 6053 - RNA, 19 nt, Artificial sequence
  specific aptamers
ggagagguguggaguggug

SEQ ID NO: 6054 - RNA, 20 nt, Artificial sequence
  specific aptamers
ggagaggugugguagaggag

SEQ ID NO: 6055 - RNA, 20 nt, Artificial sequence
  specific aptamers
ggagaggugugguagaggcg

SEQ ID NO: 6056 - RNA, 20 nt, Artificial sequence
  specific aptamers
ggagaggugugguagaggug

SEQ ID NO: 6057 - RNA, 20 nt, Artificial sequence
  specific aptamers
ggagaggugugguagcggag

SEQ ID NO: 6058 - RNA, 20 nt, Artificial sequence
  specific aptamers
ggagaggugugguagcggcg

SEQ ID NO: 6059 - RNA, 20 nt, Artificial sequence
  specific aptamers
ggagaggugugguagcggug

SEQ ID NO: 6060 - RNA, 20 nt, Artificial sequence
  specific aptamers
ggagaggugugguaguggag

SEQ ID NO: 6061 - RNA, 20 nt, Artificial sequence
  specific aptamers
ggagaggugugguaguggcg

SEQ ID NO: 6062 - RNA, 20 nt, Artificial sequence
  specific aptamers
ggagaggugugguaguggug

SEQ ID NO: 6063 - RNA, 20 nt, Artificial sequence
  specific aptamers
ggagaggugugguugaggag

SEQ ID NO: 6064 - RNA, 20 nt, Artificial sequence
  specific aptamers
ggagaggugugguugaggcg

SEQ ID NO: 6065 - RNA, 20 nt, Artificial sequence
  specific aptamers
ggagaggugugguugaggug

SEQ ID NO: 6066 - RNA, 20 nt, Artificial sequence
  specific aptamers
ggagaggugugguugcggag

SEQ ID NO: 6067 - RNA, 20 nt, Artificial sequence
  specific aptamers
ggagaggugugguugcggcg

SEQ ID NO: 6068 - RNA, 20 nt, Artificial sequence
  specific aptamers
ggagaggugugguugcggug

SEQ ID NO: 6069 - RNA, 20 nt, Artificial sequence
  specific aptamers
ggagaggugugguuguggag

SEQ ID NO: 6070 - RNA, 20 nt, Artificial sequence
  specific aptamers
ggagaggugugguuguggcg

SEQ ID NO: 6071 - RNA, 20 nt, Artificial sequence
  specific aptamers
ggagaggugugguuguggug

SEQ ID NO: 6072 - RNA, 19 nt, Artificial sequence
  specific aptamers
ggagagguguggugaggag

SEQ ID NO: 6073 - RNA, 19 nt, Artificial sequence
  specific aptamers
ggagagguguggugaggcg

SEQ ID NO: 6074 - RNA, 19 nt, Artificial sequence
  specific aptamers
ggagagguguggugaggug

SEQ ID NO: 6075 - RNA, 19 nt, Artificial sequence
  specific aptamers
ggagagguguggugcggag

SEQ ID NO: 6076 - RNA, 19 nt, Artificial sequence
  specific aptamers
ggagagguguggugcggcg

SEQ ID NO: 6077 - RNA, 19 nt, Artificial sequence
  specific aptamers
ggagagguguggugcggug

SEQ ID NO: 6078 - RNA, 19 nt, Artificial sequence
  specific aptamers
ggagaggugugguguggag

SEQ ID NO: 6079 - RNA, 19 nt, Artificial sequence
  specific aptamers
ggagaggugugguguggcg

SEQ ID NO: 6080 - RNA, 19 nt, Artificial sequence
  specific aptamers
ggagaggugugguguggug

SEQ ID NO: 6081 - RNA, 20 nt, Artificial sequence
  specific aptamers
ggaguggagaggaagaggag

SEQ ID NO: 6082 - RNA, 20 nt, Artificial sequence
  specific aptamers
ggaguggagaggaagaggcg

SEQ ID NO: 6083 - RNA, 20 nt, Artificial sequence
  specific aptamers
ggaguggagaggaagaggug

SEQ ID NO: 6084 - RNA, 20 nt, Artificial sequence
  specific aptamers
ggaguggagaggaagcggag

SEQ ID NO: 6085 - RNA, 20 nt, Artificial sequence
  specific aptamers
ggaguggagaggaagcggcg

SEQ ID NO: 6086 - RNA, 20 nt, Artificial sequence
  specific aptamers
ggaguggagaggaagcggug

SEQ ID NO: 6087 - RNA, 20 nt, Artificial sequence
  specific aptamers
ggaguggagaggaaguggag

SEQ ID NO: 6088 - RNA, 20 nt, Artificial sequence
  specific aptamers
ggaguggagaggaaguggcg

SEQ ID NO: 6089 - RNA, 20 nt, Artificial sequence
  specific aptamers
ggaguggagaggaaguggug

SEQ ID NO: 6090 - RNA, 20 nt, Artificial sequence
  specific aptamers
ggaguggagaggaugaggag

SEQ ID NO: 6091 - RNA, 20 nt, Artificial sequence
  specific aptamers
ggaguggagaggaugaggcg

SEQ ID NO: 6092 - RNA, 20 nt, Artificial sequence
  specific aptamers
ggaguggagaggaugaggug

SEQ ID NO: 6093 - RNA, 20 nt, Artificial sequence
  specific aptamers
ggaguggagaggaugcggag

SEQ ID NO: 6094 - RNA, 20 nt, Artificial sequence
  specific aptamers
ggaguggagaggaugcggcg

SEQ ID NO: 6095 - RNA, 20 nt, Artificial sequence
  specific aptamers
ggaguggagaggaugcggug

SEQ ID NO: 6096 - RNA, 20 nt, Artificial sequence
  specific aptamers
ggaguggagaggauguggag

SEQ ID NO: 6097 - RNA, 20 nt, Artificial sequence
  specific aptamers
ggaguggagaggauguggcg

SEQ ID NO: 6098 - RNA, 20 nt, Artificial sequence
  specific aptamers
ggaguggagaggauguggug

SEQ ID NO: 6099 - RNA, 19 nt, Artificial sequence
  specific aptamers
ggaguggagaggagaggag

SEQ ID NO: 6100 - RNA, 19 nt, Artificial sequence
  specific aptamers
ggaguggagaggagaggcg

SEQ ID NO: 6101 - RNA, 19 nt, Artificial sequence
  specific aptamers
ggaguggagaggagaggug

SEQ ID NO: 6102 - RNA, 19 nt, Artificial sequence
  specific aptamers
ggaguggagaggagcggag

SEQ ID NO: 6103 - RNA, 19 nt, Artificial sequence
  specific aptamers
ggaguggagaggagcggcg

SEQ ID NO: 6104 - RNA, 19 nt, Artificial sequence
  specific aptamers
ggaguggagaggagcggug

SEQ ID NO: 6105 - RNA, 19 nt, Artificial sequence
  specific aptamers
ggaguggagaggaguggag

SEQ ID NO: 6106 - RNA, 19 nt, Artificial sequence
  specific aptamers
ggaguggagaggaguggcg

SEQ ID NO: 6107 - RNA, 19 nt, Artificial sequence
  specific aptamers
ggaguggagaggaguggug

SEQ ID NO: 6108 - RNA, 20 nt, Artificial sequence
  specific aptamers
ggaguggagagguagaggag

SEQ ID NO: 6109 - RNA, 20 nt, Artificial sequence
  specific aptamers
ggaguggagagguagaggcg

SEQ ID NO: 6110 - RNA, 20 nt, Artificial sequence
  specific aptamers
ggaguggagagguagaggug

SEQ ID NO: 6111 - RNA, 20 nt, Artificial sequence
  specific aptamers
ggaguggagagguagcggag

SEQ ID NO: 6112 - RNA, 20 nt, Artificial sequence
  specific aptamers
ggaguggagagguagcggcg

SEQ ID NO: 6113 - RNA, 20 nt, Artificial sequence
  specific aptamers
ggaguggagagguagcggug

SEQ ID NO: 6114 - RNA, 20 nt, Artificial sequence
  specific aptamers
ggaguggagagguaguggag

SEQ ID NO: 6115 - RNA, 20 nt, Artificial sequence
  specific aptamers
ggaguggagagguaguggcg

SEQ ID NO: 6116 - RNA, 20 nt, Artificial sequence
  specific aptamers
ggaguggagagguaguggug

SEQ ID NO: 6117 - RNA, 20 nt, Artificial sequence
  specific aptamers
ggaguggagagguugaggag

SEQ ID NO: 6118 - RNA, 20 nt, Artificial sequence
  specific aptamers
ggaguggagagguugaggcg

SEQ ID NO: 6119 - RNA, 20 nt, Artificial sequence
  specific aptamers
ggaguggagagguugaggug

SEQ ID NO: 6120 - RNA, 20 nt, Artificial sequence
  specific aptamers
ggaguggagagguugcggag

SEQ ID NO: 6121 - RNA, 20 nt, Artificial sequence
  specific aptamers
ggaguggagagguugcggcg

SEQ ID NO: 6122 - RNA, 20 nt, Artificial sequence
  specific aptamers
ggaguggagagguugcggug

SEQ ID NO: 6123 - RNA, 20 nt, Artificial sequence
  specific aptamers
ggaguggagagguuguggag

SEQ ID NO: 6124 - RNA, 20 nt, Artificial sequence
  specific aptamers
ggaguggagagguuguggcg

SEQ ID NO: 6125 - RNA, 20 nt, Artificial sequence
  specific aptamers
ggaguggagagguuguggug

SEQ ID NO: 6126 - RNA, 19 nt, Artificial sequence
  specific aptamers
ggaguggagaggugaggag

SEQ ID NO: 6127 - RNA, 19 nt, Artificial sequence
  specific aptamers
ggaguggagaggugaggcg

SEQ ID NO: 6128 - RNA, 19 nt, Artificial sequence
  specific aptamers
ggaguggagaggugaggug

SEQ ID NO: 6129 - RNA, 19 nt, Artificial sequence
  specific aptamers
ggaguggagaggugcggag

SEQ ID NO: 6130 - RNA, 19 nt, Artificial sequence
  specific aptamers
ggaguggagaggugcggcg

SEQ ID NO: 6131 - RNA, 19 nt, Artificial sequence
  specific aptamers
ggaguggagaggugcggug

SEQ ID NO: 6132 - RNA, 19 nt, Artificial sequence
  specific aptamers
ggaguggagagguguggag

SEQ ID NO: 6133 - RNA, 19 nt, Artificial sequence
  specific aptamers
ggaguggagagguguggcg

SEQ ID NO: 6134 - RNA, 19 nt, Artificial sequence
  specific aptamers
ggaguggagagguguggug

SEQ ID NO: 6135 - RNA, 20 nt, Artificial sequence
  specific aptamers
ggaguggaguggaagaggag

SEQ ID NO: 6136 - RNA, 20 nt, Artificial sequence
  specific aptamers
ggaguggaguggaagaggcg

SEQ ID NO: 6137 - RNA, 20 nt, Artificial sequence
  specific aptamers
ggaguggaguggaagaggug

SEQ ID NO: 6138 - RNA, 20 nt, Artificial sequence
  specific aptamers
ggaguggaguggaagcggag

SEQ ID NO: 6139 - RNA, 20 nt, Artificial sequence
  specific aptamers
ggaguggaguggaagcggcg

SEQ ID NO: 6140 - RNA, 20 nt, Artificial sequence
  specific aptamers
ggaguggaguggaagcggug

SEQ ID NO: 6141 - RNA, 20 nt, Artificial sequence
  specific aptamers
ggaguggaguggaaguggag

SEQ ID NO: 6142 - RNA, 20 nt, Artificial sequence
  specific aptamers
ggaguggaguggaaguggcg

SEQ ID NO: 6143 - RNA, 20 nt, Artificial sequence
  specific aptamers
ggaguggaguggaaguggug

SEQ ID NO: 6144 - RNA, 20 nt, Artificial sequence
  specific aptamers
ggaguggaguggaugaggag

SEQ ID NO: 6145 - RNA, 20 nt, Artificial sequence
  specific aptamers
ggaguggaguggaugaggcg

SEQ ID NO: 6146 - RNA, 20 nt, Artificial sequence
  specific aptamers
ggaguggaguggaugaggug

SEQ ID NO: 6147 - RNA, 20 nt, Artificial sequence
  specific aptamers
ggaguggaguggaugcggag

SEQ ID NO: 6148 - RNA, 20 nt, Artificial sequence
  specific aptamers
ggaguggaguggaugcggcg

SEQ ID NO: 6149 - RNA, 20 nt, Artificial sequence
  specific aptamers
ggaguggaguggaugcggug

SEQ ID NO: 6150 - RNA, 20 nt, Artificial sequence
  specific aptamers
ggaguggaguggauguggag

SEQ ID NO: 6151 - RNA, 20 nt, Artificial sequence
  specific aptamers
ggaguggaguggauguggcg

SEQ ID NO: 6152 - RNA, 20 nt, Artificial sequence
  specific aptamers
ggaguggaguggauguggug

SEQ ID NO: 6153 - RNA, 19 nt, Artificial sequence
  specific aptamers
ggaguggaguggagaggag

SEQ ID NO: 6154 - RNA, 19 nt, Artificial sequence
  specific aptamers
ggaguggaguggagaggcg

SEQ ID NO: 6155 - RNA, 19 nt, Artificial sequence
  specific aptamers
ggaguggaguggagaggug

SEQ ID NO: 6156 - RNA, 19 nt, Artificial sequence
  specific aptamers
ggaguggaguggagcggag

SEQ ID NO: 6157 - RNA, 19 nt, Artificial sequence
  specific aptamers
ggaguggaguggagcggcg

SEQ ID NO: 6158 - RNA, 19 nt, Artificial sequence
  specific aptamers
ggaguggaguggagcggug

SEQ ID NO: 6159 - RNA, 19 nt, Artificial sequence
  specific aptamers
ggaguggaguggaguggag

SEQ ID NO: 6160 - RNA, 19 nt, Artificial sequence
  specific aptamers
ggaguggaguggaguggcg

SEQ ID NO: 6161 - RNA, 19 nt, Artificial sequence
  specific aptamers
ggaguggaguggaguggug

SEQ ID NO: 6162 - RNA, 20 nt, Artificial sequence
  specific aptamers
ggaguggagugguagaggag

SEQ ID NO: 6163 - RNA, 20 nt, Artificial sequence
  specific aptamers
ggaguggagugguagaggcg

SEQ ID NO: 6164 - RNA, 20 nt, Artificial sequence
  specific aptamers
ggaguggagugguagaggug

SEQ ID NO: 6165 - RNA, 20 nt, Artificial sequence
  specific aptamers
ggaguggagugguagcggag

SEQ ID NO: 6166 - RNA, 20 nt, Artificial sequence
  specific aptamers
ggaguggagugguagcggcg

SEQ ID NO: 6167 - RNA, 20 nt, Artificial sequence
  specific aptamers
ggaguggagugguagcggug

SEQ ID NO: 6168 - RNA, 20 nt, Artificial sequence
  specific aptamers
ggaguggagugguaguggag

SEQ ID NO: 6169 - RNA, 20 nt, Artificial sequence
  specific aptamers
ggaguggagugguaguggcg

SEQ ID NO: 6170 - RNA, 20 nt, Artificial sequence
  specific aptamers
ggaguggagugguaguggug

SEQ ID NO: 6171 - RNA, 20 nt, Artificial sequence
  specific aptamers
ggaguggagugguugaggag

SEQ ID NO: 6172 - RNA, 20 nt, Artificial sequence
  specific aptamers
ggaguggagugguugaggcg

SEQ ID NO: 6173 - RNA, 20 nt, Artificial sequence
  specific aptamers
ggaguggagugguugaggug

SEQ ID NO: 6174 - RNA, 20 nt, Artificial sequence
  specific aptamers
ggaguggagugguugcggag

SEQ ID NO: 6175 - RNA, 20 nt, Artificial sequence
  specific aptamers
ggaguggagugguugcggcg

SEQ ID NO: 6176 - RNA, 20 nt, Artificial sequence
  specific aptamers
ggaguggagugguugcggug

SEQ ID NO: 6177 - RNA, 20 nt, Artificial sequence
  specific aptamers
ggaguggagugguuguggag

SEQ ID NO: 6178 - RNA, 20 nt, Artificial sequence
  specific aptamers
ggaguggagugguuguggcg

SEQ ID NO: 6179 - RNA, 20 nt, Artificial sequence
  specific aptamers
ggaguggagugguuguggug

SEQ ID NO: 6180 - RNA, 19 nt, Artificial sequence
  specific aptamers
ggaguggaguggugaggag

SEQ ID NO: 6181 - RNA, 19 nt, Artificial sequence
  specific aptamers
ggaguggaguggugaggcg

SEQ ID NO: 6182 - RNA, 19 nt, Artificial sequence
  specific aptamers
ggaguggaguggugaggug

SEQ ID NO: 6183 - RNA, 19 nt, Artificial sequence
  specific aptamers
ggaguggaguggugcggag

SEQ ID NO: 6184 - RNA, 19 nt, Artificial sequence
  specific aptamers
ggaguggaguggugcggcg

SEQ ID NO: 6185 - RNA, 19 nt, Artificial sequence
  specific aptamers
ggaguggaguggugcggug

SEQ ID NO: 6186 - RNA, 19 nt, Artificial sequence
  specific aptamers
ggaguggagugguguggag

SEQ ID NO: 6187 - RNA, 19 nt, Artificial sequence
  specific aptamers
ggaguggagugguguggcg

SEQ ID NO: 6188 - RNA, 19 nt, Artificial sequence
  specific aptamers
ggaguggagugguguggug

SEQ ID NO: 6189 - RNA, 20 nt, Artificial sequence
  specific aptamers
ggaguggugaggaagaggag

SEQ ID NO: 6190 - RNA, 20 nt, Artificial sequence
  specific aptamers
ggaguggugaggaagaggcg

SEQ ID NO: 6191 - RNA, 20 nt, Artificial sequence
  specific aptamers
ggaguggugaggaagaggug

SEQ ID NO: 6192 - RNA, 20 nt, Artificial sequence
  specific aptamers
ggaguggugaggaagcggag

SEQ ID NO: 6193 - RNA, 20 nt, Artificial sequence
  specific aptamers
ggaguggugaggaagcggcg

SEQ ID NO: 6194 - RNA, 20 nt, Artificial sequence
  specific aptamers
ggaguggugaggaagcggug

SEQ ID NO: 6195 - RNA, 20 nt, Artificial sequence
  specific aptamers
ggaguggugaggaaguggag

SEQ ID NO: 6196 - RNA, 20 nt, Artificial sequence
  specific aptamers
ggaguggugaggaaguggcg

SEQ ID NO: 6197 - RNA, 20 nt, Artificial sequence
  specific aptamers
ggaguggugaggaaguggug

SEQ ID NO: 6198 - RNA, 20 nt, Artificial sequence
  specific aptamers
ggaguggugaggaugaggag

SEQ ID NO: 6199 - RNA, 20 nt, Artificial sequence
  specific aptamers
ggaguggugaggaugaggcg

SEQ ID NO: 6200 - RNA, 20 nt, Artificial sequence
  specific aptamers
ggaguggugaggaugaggug

SEQ ID NO: 6201 - RNA, 20 nt, Artificial sequence
  specific aptamers
ggaguggugaggaugcggag

SEQ ID NO: 6202 - RNA, 20 nt, Artificial sequence
  specific aptamers
ggaguggugaggaugcggcg

SEQ ID NO: 6203 - RNA, 20 nt, Artificial sequence
  specific aptamers
ggaguggugaggaugcggug

SEQ ID NO: 6204 - RNA, 20 nt, Artificial sequence
  specific aptamers
ggaguggugaggauguggag

SEQ ID NO: 6205 - RNA, 20 nt, Artificial sequence
  specific aptamers
ggaguggugaggauguggcg

SEQ ID NO: 6206 - RNA, 20 nt, Artificial sequence
  specific aptamers
ggaguggugaggauguggug

SEQ ID NO: 6207 - RNA, 19 nt, Artificial sequence
  specific aptamers
ggaguggugaggagaggag

SEQ ID NO: 6208 - RNA, 19 nt, Artificial sequence
  specific aptamers
ggaguggugaggagaggcg

SEQ ID NO: 6209 - RNA, 19 nt, Artificial sequence
  specific aptamers
ggaguggugaggagaggug

SEQ ID NO: 6210 - RNA, 19 nt, Artificial sequence
  specific aptamers
ggaguggugaggagcggag

SEQ ID NO: 6211 - RNA, 19 nt, Artificial sequence
  specific aptamers
ggaguggugaggagcggcg

SEQ ID NO: 6212 - RNA, 19 nt, Artificial sequence
  specific aptamers
ggaguggugaggagcggug

SEQ ID NO: 6213 - RNA, 19 nt, Artificial sequence
  specific aptamers
ggaguggugaggaguggag

SEQ ID NO: 6214 - RNA, 19 nt, Artificial sequence
  specific aptamers
ggaguggugaggaguggcg

SEQ ID NO: 6215 - RNA, 19 nt, Artificial sequence
  specific aptamers
ggaguggugaggaguggug

SEQ ID NO: 6216 - RNA, 20 nt, Artificial sequence
  specific aptamers
ggaguggugagguagaggag

SEQ ID NO: 6217 - RNA, 20 nt, Artificial sequence
  specific aptamers
ggaguggugagguagaggcg

SEQ ID NO: 6218 - RNA, 20 nt, Artificial sequence
  specific aptamers
ggaguggugagguagaggug

SEQ ID NO: 6219 - RNA, 20 nt, Artificial sequence
  specific aptamers
ggaguggugagguagcggag

SEQ ID NO: 6220 - RNA, 20 nt, Artificial sequence
  specific aptamers
ggaguggugagguagcggcg

SEQ ID NO: 6221 - RNA, 20 nt, Artificial sequence
  specific aptamers
ggaguggugagguagcggug

SEQ ID NO: 6222 - RNA, 20 nt, Artificial sequence
  specific aptamers
ggaguggugagguaguggag

SEQ ID NO: 6223 - RNA, 20 nt, Artificial sequence
  specific aptamers
ggaguggugagguaguggcg

SEQ ID NO: 6224 - RNA, 20 nt, Artificial sequence
  specific aptamers
ggaguggugagguaguggug

SEQ ID NO: 6225 - RNA, 20 nt, Artificial sequence
  specific aptamers
ggaguggugagguugaggag

SEQ ID NO: 6226 - RNA, 20 nt, Artificial sequence
  specific aptamers
ggaguggugagguugaggcg

SEQ ID NO: 6227 - RNA, 20 nt, Artificial sequence
  specific aptamers
ggaguggugagguugaggug

SEQ ID NO: 6228 - RNA, 20 nt, Artificial sequence
  specific aptamers
ggaguggugagguugcggag

SEQ ID NO: 6229 - RNA, 20 nt, Artificial sequence
  specific aptamers
ggaguggugagguugcggcg

SEQ ID NO: 6230 - RNA, 20 nt, Artificial sequence
  specific aptamers
ggaguggugagguugcggug

SEQ ID NO: 6231 - RNA, 20 nt, Artificial sequence
  specific aptamers
ggaguggugagguuguggag

SEQ ID NO: 6232 - RNA, 20 nt, Artificial sequence
  specific aptamers
ggaguggugagguuguggcg

SEQ ID NO: 6233 - RNA, 20 nt, Artificial sequence
  specific aptamers
ggaguggugagguuguggug

SEQ ID NO: 6234 - RNA, 19 nt, Artificial sequence
  specific aptamers
ggaguggugaggugaggag

SEQ ID NO: 6235 - RNA, 19 nt, Artificial sequence
  specific aptamers
ggaguggugaggugaggcg

SEQ ID NO: 6236 - RNA, 19 nt, Artificial sequence
  specific aptamers
ggaguggugaggugaggug

SEQ ID NO: 6237 - RNA, 19 nt, Artificial sequence
  specific aptamers
ggaguggugaggugcggag

SEQ ID NO: 6238 - RNA, 19 nt, Artificial sequence
  specific aptamers
ggaguggugaggugcggcg

SEQ ID NO: 6239 - RNA, 19 nt, Artificial sequence
  specific aptamers
ggaguggugaggugcggug

SEQ ID NO: 6240 - RNA, 19 nt, Artificial sequence
  specific aptamers
ggaguggugagguguggag

SEQ ID NO: 6241 - RNA, 19 nt, Artificial sequence
  specific aptamers
ggaguggugagguguggcg

SEQ ID NO: 6242 - RNA, 19 nt, Artificial sequence
  specific aptamers
ggaguggugagguguggug

SEQ ID NO: 6243 - RNA, 20 nt, Artificial sequence
  specific aptamers
ggagugguguggaagaggag

SEQ ID NO: 6244 - RNA, 20 nt, Artificial sequence
  specific aptamers
ggagugguguggaagaggcg

SEQ ID NO: 6245 - RNA, 20 nt, Artificial sequence
  specific aptamers
ggagugguguggaagaggug

SEQ ID NO: 6246 - RNA, 20 nt, Artificial sequence
  specific aptamers
ggagugguguggaagcggag

SEQ ID NO: 6247 - RNA, 20 nt, Artificial sequence
  specific aptamers
ggagugguguggaagcggcg

SEQ ID NO: 6248 - RNA, 20 nt, Artificial sequence
  specific aptamers
ggagugguguggaagcggug

SEQ ID NO: 6249 - RNA, 20 nt, Artificial sequence
  specific aptamers
ggagugguguggaaguggag

SEQ ID NO: 6250 - RNA, 20 nt, Artificial sequence
  specific aptamers
ggagugguguggaaguggcg

SEQ ID NO: 6251 - RNA, 20 nt, Artificial sequence
  specific aptamers
ggagugguguggaaguggug

SEQ ID NO: 6252 - RNA, 20 nt, Artificial sequence
  specific aptamers
ggagugguguggaugaggag

SEQ ID NO: 6253 - RNA, 20 nt, Artificial sequence
  specific aptamers
ggagugguguggaugaggcg

SEQ ID NO: 6254 - RNA, 20 nt, Artificial sequence
  specific aptamers
ggagugguguggaugaggug

SEQ ID NO: 6255 - RNA, 20 nt, Artificial sequence
  specific aptamers
ggagugguguggaugcggag

SEQ ID NO: 6256 - RNA, 20 nt, Artificial sequence
  specific aptamers
ggagugguguggaugcggcg

SEQ ID NO: 6257 - RNA, 20 nt, Artificial sequence
  specific aptamers
ggagugguguggaugcggug

SEQ ID NO: 6258 - RNA, 20 nt, Artificial sequence
  specific aptamers
ggagugguguggauguggag

SEQ ID NO: 6259 - RNA, 20 nt, Artificial sequence
  specific aptamers
ggagugguguggauguggcg

SEQ ID NO: 6260 - RNA, 20 nt, Artificial sequence
  specific aptamers
ggagugguguggauguggug

SEQ ID NO: 6261 - RNA, 19 nt, Artificial sequence
  specific aptamers
ggagugguguggagaggag

SEQ ID NO: 6262 - RNA, 19 nt, Artificial sequence
  specific aptamers
ggagugguguggagaggcg

SEQ ID NO: 6263 - RNA, 19 nt, Artificial sequence
  specific aptamers
ggagugguguggagaggug

SEQ ID NO: 6264 - RNA, 19 nt, Artificial sequence
  specific aptamers
ggagugguguggagcggag

SEQ ID NO: 6265 - RNA, 19 nt, Artificial sequence
  specific aptamers
ggagugguguggagcggcg

SEQ ID NO: 6266 - RNA, 19 nt, Artificial sequence
  specific aptamers
ggagugguguggagcggug

SEQ ID NO: 6267 - RNA, 19 nt, Artificial sequence
  specific aptamers
ggagugguguggaguggag

SEQ ID NO: 6268 - RNA, 19 nt, Artificial sequence
  specific aptamers
ggagugguguggaguggcg

SEQ ID NO: 6269 - RNA, 19 nt, Artificial sequence
  specific aptamers
ggagugguguggaguggug

SEQ ID NO: 6270 - RNA, 20 nt, Artificial sequence
  specific aptamers
ggaguggugugguagaggag

SEQ ID NO: 6271 - RNA, 20 nt, Artificial sequence
  specific aptamers
ggaguggugugguagaggcg

SEQ ID NO: 6272 - RNA, 20 nt, Artificial sequence
  specific aptamers
ggaguggugugguagaggug

SEQ ID NO: 6273 - RNA, 20 nt, Artificial sequence
  specific aptamers
ggaguggugugguagcggag

SEQ ID NO: 6274 - RNA, 20 nt, Artificial sequence
  specific aptamers
ggaguggugugguagcggcg

SEQ ID NO: 6275 - RNA, 20 nt, Artificial sequence
  specific aptamers
ggaguggugugguagcggug

SEQ ID NO: 6276 - RNA, 20 nt, Artificial sequence
  specific aptamers
ggaguggugugguaguggag

SEQ ID NO: 6277 - RNA, 20 nt, Artificial sequence
  specific aptamers
ggaguggugugguaguggcg

SEQ ID NO: 6278 - RNA, 20 nt, Artificial sequence
  specific aptamers
ggaguggugugguaguggug

SEQ ID NO: 6279 - RNA, 20 nt, Artificial sequence
  specific aptamers
ggaguggugugguugaggag

SEQ ID NO: 6280 - RNA, 20 nt, Artificial sequence
  specific aptamers
ggaguggugugguugaggcg

SEQ ID NO: 6281 - RNA, 20 nt, Artificial sequence
  specific aptamers
ggaguggugugguugaggug

SEQ ID NO: 6282 - RNA, 20 nt, Artificial sequence
  specific aptamers
ggaguggugugguugcggag

SEQ ID NO: 6283 - RNA, 20 nt, Artificial sequence
  specific aptamers
ggaguggugugguugcggcg

SEQ ID NO: 6284 - RNA, 20 nt, Artificial sequence
  specific aptamers
ggaguggugugguugcggug

SEQ ID NO: 6285 - RNA, 20 nt, Artificial sequence
  specific aptamers
ggaguggugugguuguggag

SEQ ID NO: 6286 - RNA, 20 nt, Artificial sequence
  specific aptamers
ggaguggugugguuguggcg

SEQ ID NO: 6287 - RNA, 20 nt, Artificial sequence
  specific aptamers
ggaguggugugguuguggug

SEQ ID NO: 6288 - RNA, 19 nt, Artificial sequence
  specific aptamers
ggagugguguggugaggag

SEQ ID NO: 6289 - RNA, 19 nt, Artificial sequence
  specific aptamers
ggagugguguggugaggcg

SEQ ID NO: 6290 - RNA, 19 nt, Artificial sequence
  specific aptamers
ggagugguguggugaggug

SEQ ID NO: 6291 - RNA, 19 nt, Artificial sequence
  specific aptamers
ggagugguguggugcggag

SEQ ID NO: 6292 - RNA, 19 nt, Artificial sequence
  specific aptamers
ggagugguguggugcggcg

SEQ ID NO: 6293 - RNA, 19 nt, Artificial sequence
  specific aptamers
ggagugguguggugcggug

SEQ ID NO: 6294 - RNA, 19 nt, Artificial sequence
  specific aptamers
ggaguggugugguguggag

SEQ ID NO: 6295 - RNA, 19 nt, Artificial sequence
  specific aptamers
ggaguggugugguguggcg

SEQ ID NO: 6296 - RNA, 19 nt, Artificial sequence
  specific aptamers
ggaguggugugguguggug

SEQ ID NO: 6297 - RNA, 20 nt, Artificial sequence
  specific aptamers
ggugaggagaggaagaggag

SEQ ID NO: 6298 - RNA, 20 nt, Artificial sequence
  specific aptamers
ggugaggagaggaagaggcg

SEQ ID NO: 6299 - RNA, 20 nt, Artificial sequence
  specific aptamers
ggugaggagaggaagaggug

SEQ ID NO: 6300 - RNA, 20 nt, Artificial sequence
  specific aptamers
ggugaggagaggaagcggag

SEQ ID NO: 6301 - RNA, 20 nt, Artificial sequence
  specific aptamers
ggugaggagaggaagcggcg

SEQ ID NO: 6302 - RNA, 20 nt, Artificial sequence
  specific aptamers
ggugaggagaggaagcggug

SEQ ID NO: 6303 - RNA, 20 nt, Artificial sequence
  specific aptamers
ggugaggagaggaaguggag

SEQ ID NO: 6304 - RNA, 20 nt, Artificial sequence
  specific aptamers
ggugaggagaggaaguggcg

SEQ ID NO: 6305 - RNA, 20 nt, Artificial sequence
  specific aptamers
ggugaggagaggaaguggug

SEQ ID NO: 6306 - RNA, 20 nt, Artificial sequence
  specific aptamers
ggugaggagaggaugaggag

SEQ ID NO: 6307 - RNA, 20 nt, Artificial sequence
  specific aptamers
ggugaggagaggaugaggcg

SEQ ID NO: 6308 - RNA, 20 nt, Artificial sequence
  specific aptamers
ggugaggagaggaugaggug

SEQ ID NO: 6309 - RNA, 20 nt, Artificial sequence
  specific aptamers
ggugaggagaggaugcggag

SEQ ID NO: 6310 - RNA, 20 nt, Artificial sequence
  specific aptamers
ggugaggagaggaugcggcg

SEQ ID NO: 6311 - RNA, 20 nt, Artificial sequence
  specific aptamers
ggugaggagaggaugcggug

SEQ ID NO: 6312 - RNA, 20 nt, Artificial sequence
  specific aptamers
ggugaggagaggauguggag

SEQ ID NO: 6313 - RNA, 20 nt, Artificial sequence
  specific aptamers
ggugaggagaggauguggcg

SEQ ID NO: 6314 - RNA, 20 nt, Artificial sequence
  specific aptamers
ggugaggagaggauguggug

SEQ ID NO: 6315 - RNA, 19 nt, Artificial sequence
  specific aptamers
ggugaggagaggagaggcg

SEQ ID NO: 6316 - RNA, 19 nt, Artificial sequence
  specific aptamers
ggugaggagaggagaggug

SEQ ID NO: 6317 - RNA, 19 nt, Artificial sequence
  specific aptamers
ggugaggagaggagcggag

SEQ ID NO: 6318 - RNA, 19 nt, Artificial sequence
  specific aptamers
ggugaggagaggagcggcg

SEQ ID NO: 6319 - RNA, 19 nt, Artificial sequence
  specific aptamers
ggugaggagaggagcggug

SEQ ID NO: 6320 - RNA, 19 nt, Artificial sequence
  specific aptamers
ggugaggagaggaguggag

SEQ ID NO: 6321 - RNA, 19 nt, Artificial sequence
  specific aptamers
ggugaggagaggaguggcg

SEQ ID NO: 6322 - RNA, 19 nt, Artificial sequence
  specific aptamers
ggugaggagaggaguggug

SEQ ID NO: 6323 - RNA, 20 nt, Artificial sequence
  specific aptamers
ggugaggagagguagaggag

SEQ ID NO: 6324 - RNA, 20 nt, Artificial sequence
  specific aptamers
ggugaggagagguagaggcg

SEQ ID NO: 6325 - RNA, 20 nt, Artificial sequence
  specific aptamers
ggugaggagagguagaggug

SEQ ID NO: 6326 - RNA, 20 nt, Artificial sequence
  specific aptamers
ggugaggagagguagcggag

SEQ ID NO: 6327 - RNA, 20 nt, Artificial sequence
  specific aptamers
ggugaggagagguagcggcg

SEQ ID NO: 6328 - RNA, 20 nt, Artificial sequence
  specific aptamers
ggugaggagagguagcggug

SEQ ID NO: 6329 - RNA, 20 nt, Artificial sequence
  specific aptamers
ggugaggagagguaguggag

SEQ ID NO: 6330 - RNA, 20 nt, Artificial sequence
  specific aptamers
ggugaggagagguaguggcg

SEQ ID NO: 6331 - RNA, 20 nt, Artificial sequence
  specific aptamers
ggugaggagagguaguggug

SEQ ID NO: 6332 - RNA, 20 nt, Artificial sequence
  specific aptamers
ggugaggagagguugaggag

SEQ ID NO: 6333 - RNA, 20 nt, Artificial sequence
  specific aptamers
ggugaggagagguugaggcg

SEQ ID NO: 6334 - RNA, 20 nt, Artificial sequence
  specific aptamers
ggugaggagagguugaggug

SEQ ID NO: 6335 - RNA, 20 nt, Artificial sequence
  specific aptamers
ggugaggagagguugcggag

SEQ ID NO: 6336 - RNA, 20 nt, Artificial sequence
  specific aptamers
ggugaggagagguugcggcg

SEQ ID NO: 6337 - RNA, 20 nt, Artificial sequence
  specific aptamers
ggugaggagagguugcggug

SEQ ID NO: 6338 - RNA, 20 nt, Artificial sequence
  specific aptamers
ggugaggagagguuguggag

SEQ ID NO: 6339 - RNA, 20 nt, Artificial sequence
  specific aptamers
ggugaggagagguuguggcg

SEQ ID NO: 6340 - RNA, 20 nt, Artificial sequence
  specific aptamers
ggugaggagagguuguggug

SEQ ID NO: 6341 - RNA, 19 nt, Artificial sequence
  specific aptamers
ggugaggagaggugaggag

SEQ ID NO: 6342 - RNA, 19 nt, Artificial sequence
  specific aptamers
ggugaggagaggugaggcg

SEQ ID NO: 6343 - RNA, 19 nt, Artificial sequence
  specific aptamers
ggugaggagaggugaggug

SEQ ID NO: 6344 - RNA, 19 nt, Artificial sequence
  specific aptamers
ggugaggagaggugcggag

SEQ ID NO: 6345 - RNA, 19 nt, Artificial sequence
  specific aptamers
ggugaggagaggugcggcg

SEQ ID NO: 6346 - RNA, 19 nt, Artificial sequence
  specific aptamers
ggugaggagaggugcggug

SEQ ID NO: 6347 - RNA, 19 nt, Artificial sequence
  specific aptamers
ggugaggagagguguggag

SEQ ID NO: 6348 - RNA, 19 nt, Artificial sequence
  specific aptamers
ggugaggagagguguggcg

SEQ ID NO: 6349 - RNA, 19 nt, Artificial sequence
  specific aptamers
ggugaggagagguguggug

SEQ ID NO: 6350 - RNA, 20 nt, Artificial sequence
  specific aptamers
ggugaggaguggaagaggag

SEQ ID NO: 6351 - RNA, 20 nt, Artificial sequence
  specific aptamers
ggugaggaguggaagaggcg

SEQ ID NO: 6352 - RNA, 20 nt, Artificial sequence
  specific aptamers
ggugaggaguggaagaggug

SEQ ID NO: 6353 - RNA, 20 nt, Artificial sequence
  specific aptamers
ggugaggaguggaagcggag

SEQ ID NO: 6354 - RNA, 20 nt, Artificial sequence
  specific aptamers
ggugaggaguggaagcggcg

SEQ ID NO: 6355 - RNA, 20 nt, Artificial sequence
  specific aptamers
ggugaggaguggaagcggug

SEQ ID NO: 6356 - RNA, 20 nt, Artificial sequence
  specific aptamers
ggugaggaguggaaguggag

SEQ ID NO: 6357 - RNA, 20 nt, Artificial sequence
  specific aptamers
ggugaggaguggaaguggcg

SEQ ID NO: 6358 - RNA, 20 nt, Artificial sequence
  specific aptamers
ggugaggaguggaaguggug

SEQ ID NO: 6359 - RNA, 20 nt, Artificial sequence
  specific aptamers
ggugaggaguggaugaggag

SEQ ID NO: 6360 - RNA, 20 nt, Artificial sequence
  specific aptamers
ggugaggaguggaugaggcg

SEQ ID NO: 6361 - RNA, 20 nt, Artificial sequence
  specific aptamers
ggugaggaguggaugaggug

SEQ ID NO: 6362 - RNA, 20 nt, Artificial sequence
  specific aptamers
ggugaggaguggaugcggag

SEQ ID NO: 6363 - RNA, 20 nt, Artificial sequence
  specific aptamers
ggugaggaguggaugcggcg

SEQ ID NO: 6364 - RNA, 20 nt, Artificial sequence
  specific aptamers
ggugaggaguggaugcggug

SEQ ID NO: 6365 - RNA, 20 nt, Artificial sequence
  specific aptamers
ggugaggaguggauguggag

SEQ ID NO: 6366 - RNA, 20 nt, Artificial sequence
  specific aptamers
ggugaggaguggauguggcg

SEQ ID NO: 6367 - RNA, 20 nt, Artificial sequence
  specific aptamers
ggugaggaguggauguggug

SEQ ID NO: 6368 - RNA, 19 nt, Artificial sequence
  specific aptamers
ggugaggaguggagaggcg

SEQ ID NO: 6369 - RNA, 19 nt, Artificial sequence
  specific aptamers
ggugaggaguggagaggug

SEQ ID NO: 6370 - RNA, 19 nt, Artificial sequence
  specific aptamers
ggugaggaguggagcggag

SEQ ID NO: 6371 - RNA, 19 nt, Artificial sequence
  specific aptamers
ggugaggaguggagcggcg

SEQ ID NO: 6372 - RNA, 19 nt, Artificial sequence
  specific aptamers
ggugaggaguggagcggug

SEQ ID NO: 6373 - RNA, 19 nt, Artificial sequence
  specific aptamers
ggugaggaguggaguggag

SEQ ID NO: 6374 - RNA, 19 nt, Artificial sequence
  specific aptamers
ggugaggaguggaguggcg

SEQ ID NO: 6375 - RNA, 19 nt, Artificial sequence
  specific aptamers
ggugaggaguggaguggug

SEQ ID NO: 6376 - RNA, 20 nt, Artificial sequence
  specific aptamers
ggugaggagugguagaggag

SEQ ID NO: 6377 - RNA, 20 nt, Artificial sequence
  specific aptamers
ggugaggagugguagaggcg

SEQ ID NO: 6378 - RNA, 20 nt, Artificial sequence
  specific aptamers
ggugaggagugguagaggug

SEQ ID NO: 6379 - RNA, 20 nt, Artificial sequence
  specific aptamers
ggugaggagugguagcggag

SEQ ID NO: 6380 - RNA, 20 nt, Artificial sequence
  specific aptamers
ggugaggagugguagcggcg

SEQ ID NO: 6381 - RNA, 20 nt, Artificial sequence
  specific aptamers
ggugaggagugguagcggug

SEQ ID NO: 6382 - RNA, 20 nt, Artificial sequence
  specific aptamers
ggugaggagugguaguggag

SEQ ID NO: 6383 - RNA, 20 nt, Artificial sequence
  specific aptamers
ggugaggagugguaguggcg

SEQ ID NO: 6384 - RNA, 20 nt, Artificial sequence
  specific aptamers
ggugaggagugguaguggug

SEQ ID NO: 6385 - RNA, 20 nt, Artificial sequence
  specific aptamers
ggugaggagugguugaggag

SEQ ID NO: 6386 - RNA, 20 nt, Artificial sequence
  specific aptamers
ggugaggagugguugaggcg

SEQ ID NO: 6387 - RNA, 20 nt, Artificial sequence
  specific aptamers
ggugaggagugguugaggug

SEQ ID NO: 6388 - RNA, 20 nt, Artificial sequence
  specific aptamers
ggugaggagugguugcggag

SEQ ID NO: 6389 - RNA, 20 nt, Artificial sequence
  specific aptamers
ggugaggagugguugcggcg

SEQ ID NO: 6390 - RNA, 20 nt, Artificial sequence
  specific aptamers
ggugaggagugguugcggug

SEQ ID NO: 6391 - RNA, 20 nt, Artificial sequence
  specific aptamers
ggugaggagugguuguggag

SEQ ID NO: 6392 - RNA, 20 nt, Artificial sequence
  specific aptamers
ggugaggagugguuguggcg

SEQ ID NO: 6393 - RNA, 20 nt, Artificial sequence
  specific aptamers
ggugaggagugguuguggug

SEQ ID NO: 6394 - RNA, 19 nt, Artificial sequence
  specific aptamers
ggugaggaguggugaggag

SEQ ID NO: 6395 - RNA, 19 nt, Artificial sequence
  specific aptamers
ggugaggaguggugaggcg

SEQ ID NO: 6396 - RNA, 19 nt, Artificial sequence
  specific aptamers
ggugaggaguggugaggug

SEQ ID NO: 6397 - RNA, 19 nt, Artificial sequence
  specific aptamers
ggugaggaguggugcggag

SEQ ID NO: 6398 - RNA, 19 nt, Artificial sequence
  specific aptamers
ggugaggaguggugcggcg

SEQ ID NO: 6399 - RNA, 19 nt, Artificial sequence
  specific aptamers
ggugaggaguggugcggug

SEQ ID NO: 6400 - RNA, 19 nt, Artificial sequence
  specific aptamers
ggugaggagugguguggag

SEQ ID NO: 6401 - RNA, 19 nt, Artificial sequence
  specific aptamers
ggugaggagugguguggcg

SEQ ID NO: 6402 - RNA, 19 nt, Artificial sequence
  specific aptamers
ggugaggagugguguggug

SEQ ID NO: 6403 - RNA, 20 nt, Artificial sequence
  specific aptamers
ggugaggugaggaagaggag

SEQ ID NO: 6404 - RNA, 20 nt, Artificial sequence
  specific aptamers
ggugaggugaggaagaggcg

SEQ ID NO: 6405 - RNA, 20 nt, Artificial sequence
  specific aptamers
ggugaggugaggaagaggug

SEQ ID NO: 6406 - RNA, 20 nt, Artificial sequence
  specific aptamers
ggugaggugaggaagcggag

SEQ ID NO: 6407 - RNA, 20 nt, Artificial sequence
  specific aptamers
ggugaggugaggaagcggcg

SEQ ID NO: 6408 - RNA, 20 nt, Artificial sequence
  specific aptamers
ggugaggugaggaagcggug

SEQ ID NO: 6409 - RNA, 20 nt, Artificial sequence
  specific aptamers
ggugaggugaggaaguggag

SEQ ID NO: 6410 - RNA, 20 nt, Artificial sequence
  specific aptamers
ggugaggugaggaaguggcg

SEQ ID NO: 6411 - RNA, 20 nt, Artificial sequence
  specific aptamers
ggugaggugaggaaguggug

SEQ ID NO: 6412 - RNA, 20 nt, Artificial sequence
  specific aptamers
ggugaggugaggaugaggag

SEQ ID NO: 6413 - RNA, 20 nt, Artificial sequence
  specific aptamers
ggugaggugaggaugaggcg

SEQ ID NO: 6414 - RNA, 20 nt, Artificial sequence
  specific aptamers
ggugaggugaggaugaggug

SEQ ID NO: 6415 - RNA, 20 nt, Artificial sequence
  specific aptamers
ggugaggugaggaugcggag

SEQ ID NO: 6416 - RNA, 20 nt, Artificial sequence
  specific aptamers
ggugaggugaggaugcggcg

SEQ ID NO: 6417 - RNA, 20 nt, Artificial sequence
  specific aptamers
ggugaggugaggaugcggug

SEQ ID NO: 6418 - RNA, 20 nt, Artificial sequence
  specific aptamers
ggugaggugaggauguggag

SEQ ID NO: 6419 - RNA, 20 nt, Artificial sequence
  specific aptamers
ggugaggugaggauguggcg

SEQ ID NO: 6420 - RNA, 20 nt, Artificial sequence
  specific aptamers
ggugaggugaggauguggug

SEQ ID NO: 6421 - RNA, 19 nt, Artificial sequence
  specific aptamers
ggugaggugaggagaggag

SEQ ID NO: 6422 - RNA, 19 nt, Artificial sequence
  specific aptamers
ggugaggugaggagaggcg

SEQ ID NO: 6423 - RNA, 19 nt, Artificial sequence
  specific aptamers
ggugaggugaggagaggug

SEQ ID NO: 6424 - RNA, 19 nt, Artificial sequence
  specific aptamers
ggugaggugaggagcggag

SEQ ID NO: 6425 - RNA, 19 nt, Artificial sequence
  specific aptamers
ggugaggugaggagcggcg

SEQ ID NO: 6426 - RNA, 19 nt, Artificial sequence
  specific aptamers
ggugaggugaggagcggug

SEQ ID NO: 6427 - RNA, 19 nt, Artificial sequence
  specific aptamers
ggugaggugaggaguggag

SEQ ID NO: 6428 - RNA, 19 nt, Artificial sequence
  specific aptamers
ggugaggugaggaguggcg

SEQ ID NO: 6429 - RNA, 19 nt, Artificial sequence
  specific aptamers
ggugaggugaggaguggug

SEQ ID NO: 6430 - RNA, 20 nt, Artificial sequence
  specific aptamers
ggugaggugagguagaggag

SEQ ID NO: 6431 - RNA, 20 nt, Artificial sequence
  specific aptamers
ggugaggugagguagaggcg

SEQ ID NO: 6432 - RNA, 20 nt, Artificial sequence
  specific aptamers
ggugaggugagguagaggug

SEQ ID NO: 6433 - RNA, 20 nt, Artificial sequence
  specific aptamers
ggugaggugagguagcggag

SEQ ID NO: 6434 - RNA, 20 nt, Artificial sequence
  specific aptamers
ggugaggugagguagcggcg

SEQ ID NO: 6435 - RNA, 20 nt, Artificial sequence
  specific aptamers
ggugaggugagguagcggug

SEQ ID NO: 6436 - RNA, 20 nt, Artificial sequence
  specific aptamers
ggugaggugagguaguggag

SEQ ID NO: 6437 - RNA, 20 nt, Artificial sequence
  specific aptamers
ggugaggugagguaguggcg

SEQ ID NO: 6438 - RNA, 20 nt, Artificial sequence
  specific aptamers
ggugaggugagguaguggug

SEQ ID NO: 6439 - RNA, 20 nt, Artificial sequence
  specific aptamers
ggugaggugagguugaggag

SEQ ID NO: 6440 - RNA, 20 nt, Artificial sequence
  specific aptamers
ggugaggugagguugaggcg

SEQ ID NO: 6441 - RNA, 20 nt, Artificial sequence
  specific aptamers
ggugaggugagguugaggug

SEQ ID NO: 6442 - RNA, 20 nt, Artificial sequence
  specific aptamers
ggugaggugagguugcggag

SEQ ID NO: 6443 - RNA, 20 nt, Artificial sequence
  specific aptamers
ggugaggugagguugcggcg

SEQ ID NO: 6444 - RNA, 20 nt, Artificial sequence
  specific aptamers
ggugaggugagguugcggug

SEQ ID NO: 6445 - RNA, 20 nt, Artificial sequence
  specific aptamers
ggugaggugagguuguggag

SEQ ID NO: 6446 - RNA, 20 nt, Artificial sequence
  specific aptamers
ggugaggugagguuguggcg

SEQ ID NO: 6447 - RNA, 20 nt, Artificial sequence
  specific aptamers
ggugaggugagguuguggug

SEQ ID NO: 6448 - RNA, 19 nt, Artificial sequence
  specific aptamers
ggugaggugaggugaggag

SEQ ID NO: 6449 - RNA, 19 nt, Artificial sequence
  specific aptamers
ggugaggugaggugaggcg

SEQ ID NO: 6450 - RNA, 19 nt, Artificial sequence
  specific aptamers
ggugaggugaggugaggug

SEQ ID NO: 6451 - RNA, 19 nt, Artificial sequence
  specific aptamers
ggugaggugaggugcggag

SEQ ID NO: 6452 - RNA, 19 nt, Artificial sequence
  specific aptamers
ggugaggugaggugcggcg

SEQ ID NO: 6453 - RNA, 19 nt, Artificial sequence
  specific aptamers
ggugaggugaggugcggug

SEQ ID NO: 6454 - RNA, 19 nt, Artificial sequence
  specific aptamers
ggugaggugagguguggag

SEQ ID NO: 6455 - RNA, 19 nt, Artificial sequence
  specific aptamers
ggugaggugagguguggcg

SEQ ID NO: 6456 - RNA, 19 nt, Artificial sequence
  specific aptamers
ggugaggugagguguggug

SEQ ID NO: 6457 - RNA, 20 nt, Artificial sequence
  specific aptamers
ggugagguguggaagaggag

SEQ ID NO: 6458 - RNA, 20 nt, Artificial sequence
  specific aptamers
ggugagguguggaagaggcg

SEQ ID NO: 6459 - RNA, 20 nt, Artificial sequence
  specific aptamers
ggugagguguggaagaggug

SEQ ID NO: 6460 - RNA, 20 nt, Artificial sequence
  specific aptamers
ggugagguguggaagcggag

SEQ ID NO: 6461 - RNA, 20 nt, Artificial sequence
  specific aptamers
ggugagguguggaagcggcg

SEQ ID NO: 6462 - RNA, 20 nt, Artificial sequence
  specific aptamers
ggugagguguggaagcggug

SEQ ID NO: 6463 - RNA, 20 nt, Artificial sequence
  specific aptamers
ggugagguguggaaguggag

SEQ ID NO: 6464 - RNA, 20 nt, Artificial sequence
  specific aptamers
ggugagguguggaaguggcg

SEQ ID NO: 6465 - RNA, 20 nt, Artificial sequence
  specific aptamers
ggugagguguggaaguggug

SEQ ID NO: 6466 - RNA, 20 nt, Artificial sequence
  specific aptamers
ggugagguguggaugaggag

SEQ ID NO: 6467 - RNA, 20 nt, Artificial sequence
  specific aptamers
ggugagguguggaugaggcg

SEQ ID NO: 6468 - RNA, 20 nt, Artificial sequence
  specific aptamers
ggugagguguggaugaggug

SEQ ID NO: 6469 - RNA, 20 nt, Artificial sequence
  specific aptamers
ggugagguguggaugcggag

SEQ ID NO: 6470 - RNA, 20 nt, Artificial sequence
  specific aptamers
ggugagguguggaugcggcg

SEQ ID NO: 6471 - RNA, 20 nt, Artificial sequence
  specific aptamers
ggugagguguggaugcggug

SEQ ID NO: 6472 - RNA, 20 nt, Artificial sequence
  specific aptamers
ggugagguguggauguggag

SEQ ID NO: 6473 - RNA, 20 nt, Artificial sequence
  specific aptamers
ggugagguguggauguggcg

SEQ ID NO: 6474 - RNA, 20 nt, Artificial sequence
  specific aptamers
ggugagguguggauguggug

SEQ ID NO: 6475 - RNA, 19 nt, Artificial sequence
  specific aptamers
ggugagguguggagaggag

SEQ ID NO: 6476 - RNA, 19 nt, Artificial sequence
  specific aptamers
ggugagguguggagaggcg

SEQ ID NO: 6477 - RNA, 19 nt, Artificial sequence
  specific aptamers
ggugagguguggagaggug

SEQ ID NO: 6478 - RNA, 19 nt, Artificial sequence
  specific aptamers
ggugagguguggagcggag

SEQ ID NO: 6479 - RNA, 19 nt, Artificial sequence
  specific aptamers
ggugagguguggagcggcg

SEQ ID NO: 6480 - RNA, 19 nt, Artificial sequence
  specific aptamers
ggugagguguggagcggug

SEQ ID NO: 6481 - RNA, 19 nt, Artificial sequence
  specific aptamers
ggugagguguggaguggag

SEQ ID NO: 6482 - RNA, 19 nt, Artificial sequence
  specific aptamers
ggugagguguggaguggcg

SEQ ID NO: 6483 - RNA, 19 nt, Artificial sequence
  specific aptamers
ggugagguguggaguggug

SEQ ID NO: 6484 - RNA, 20 nt, Artificial sequence
  specific aptamers
ggugaggugugguagaggag

SEQ ID NO: 6485 - RNA, 20 nt, Artificial sequence
  specific aptamers
ggugaggugugguagaggcg

SEQ ID NO: 6486 - RNA, 20 nt, Artificial sequence
  specific aptamers
ggugaggugugguagaggug

SEQ ID NO: 6487 - RNA, 20 nt, Artificial sequence
  specific aptamers
ggugaggugugguagcggag

SEQ ID NO: 6488 - RNA, 20 nt, Artificial sequence
  specific aptamers
ggugaggugugguagcggcg

SEQ ID NO: 6489 - RNA, 20 nt, Artificial sequence
  specific aptamers
ggugaggugugguagcggug

SEQ ID NO: 6490 - RNA, 20 nt, Artificial sequence
  specific aptamers
ggugaggugugguaguggag

SEQ ID NO: 6491 - RNA, 20 nt, Artificial sequence
  specific aptamers
ggugaggugugguaguggcg

SEQ ID NO: 6492 - RNA, 20 nt, Artificial sequence
  specific aptamers
ggugaggugugguaguggug

SEQ ID NO: 6493 - RNA, 20 nt, Artificial sequence
  specific aptamers
ggugaggugugguugaggag

SEQ ID NO: 6494 - RNA, 20 nt, Artificial sequence
  specific aptamers
ggugaggugugguugaggcg

SEQ ID NO: 6495 - RNA, 20 nt, Artificial sequence
  specific aptamers
ggugaggugugguugaggug

SEQ ID NO: 6496 - RNA, 20 nt, Artificial sequence
  specific aptamers
ggugaggugugguugcggag

SEQ ID NO: 6497 - RNA, 20 nt, Artificial sequence
  specific aptamers
ggugaggugugguugcggcg

SEQ ID NO: 6498 - RNA, 20 nt, Artificial sequence
  specific aptamers
ggugaggugugguugcggug

SEQ ID NO: 6499 - RNA, 20 nt, Artificial sequence
  specific aptamers
ggugaggugugguuguggag

SEQ ID NO: 6500 - RNA, 20 nt, Artificial sequence
  specific aptamers
ggugaggugugguuguggcg

SEQ ID NO: 6501 - RNA, 20 nt, Artificial sequence
  specific aptamers
ggugaggugugguuguggug

SEQ ID NO: 6502 - RNA, 19 nt, Artificial sequence
  specific aptamers
ggugagguguggugaggag

SEQ ID NO: 6503 - RNA, 19 nt, Artificial sequence
  specific aptamers
ggugagguguggugaggcg

SEQ ID NO: 6504 - RNA, 19 nt, Artificial sequence
  specific aptamers
ggugagguguggugaggug

SEQ ID NO: 6505 - RNA, 19 nt, Artificial sequence
  specific aptamers
ggugagguguggugcggag

SEQ ID NO: 6506 - RNA, 19 nt, Artificial sequence
  specific aptamers
ggugagguguggugcggcg

SEQ ID NO: 6507 - RNA, 19 nt, Artificial sequence
  specific aptamers
ggugagguguggugcggug

SEQ ID NO: 6508 - RNA, 19 nt, Artificial sequence
  specific aptamers
ggugaggugugguguggag

SEQ ID NO: 6509 - RNA, 19 nt, Artificial sequence
  specific aptamers
ggugaggugugguguggcg

SEQ ID NO: 6510 - RNA, 19 nt, Artificial sequence
  specific aptamers
ggugaggugugguguggug

SEQ ID NO: 6511 - RNA, 20 nt, Artificial sequence
  specific aptamers
gguguggagaggaagaggag

SEQ ID NO: 6512 - RNA, 20 nt, Artificial sequence
  specific aptamers
gguguggagaggaagaggcg

SEQ ID NO: 6513 - RNA, 20 nt, Artificial sequence
  specific aptamers
gguguggagaggaagaggug

SEQ ID NO: 6514 - RNA, 20 nt, Artificial sequence
  specific aptamers
gguguggagaggaagcggag

SEQ ID NO: 6515 - RNA, 20 nt, Artificial sequence
  specific aptamers
gguguggagaggaagcggcg

SEQ ID NO: 6516 - RNA, 20 nt, Artificial sequence
  specific aptamers
gguguggagaggaagcggug

SEQ ID NO: 6517 - RNA, 20 nt, Artificial sequence
  specific aptamers
gguguggagaggaaguggag

SEQ ID NO: 6518 - RNA, 20 nt, Artificial sequence
  specific aptamers
gguguggagaggaaguggcg

SEQ ID NO: 6519 - RNA, 20 nt, Artificial sequence
  specific aptamers
gguguggagaggaaguggug

SEQ ID NO: 6520 - RNA, 20 nt, Artificial sequence
  specific aptamers
gguguggagaggaugaggag

SEQ ID NO: 6521 - RNA, 20 nt, Artificial sequence
  specific aptamers
gguguggagaggaugaggcg

SEQ ID NO: 6522 - RNA, 20 nt, Artificial sequence
  specific aptamers
gguguggagaggaugaggug

SEQ ID NO: 6523 - RNA, 20 nt, Artificial sequence
  specific aptamers
gguguggagaggaugcggag

SEQ ID NO: 6524 - RNA, 20 nt, Artificial sequence
  specific aptamers
gguguggagaggaugcggcg

SEQ ID NO: 6525 - RNA, 20 nt, Artificial sequence
  specific aptamers
gguguggagaggaugcggug

SEQ ID NO: 6526 - RNA, 20 nt, Artificial sequence
  specific aptamers
gguguggagaggauguggag

SEQ ID NO: 6527 - RNA, 20 nt, Artificial sequence
  specific aptamers
gguguggagaggauguggcg

SEQ ID NO: 6528 - RNA, 20 nt, Artificial sequence
  specific aptamers
gguguggagaggauguggug

SEQ ID NO: 6529 - RNA, 19 nt, Artificial sequence
  specific aptamers
gguguggagaggagaggcg

SEQ ID NO: 6530 - RNA, 19 nt, Artificial sequence
  specific aptamers
gguguggagaggagaggug

SEQ ID NO: 6531 - RNA, 19 nt, Artificial sequence
  specific aptamers
gguguggagaggagcggag

SEQ ID NO: 6532 - RNA, 19 nt, Artificial sequence
  specific aptamers
gguguggagaggagcggcg

SEQ ID NO: 6533 - RNA, 19 nt, Artificial sequence
  specific aptamers
gguguggagaggagcggug

SEQ ID NO: 6534 - RNA, 19 nt, Artificial sequence
  specific aptamers
gguguggagaggaguggag

SEQ ID NO: 6535 - RNA, 19 nt, Artificial sequence
  specific aptamers
gguguggagaggaguggcg

SEQ ID NO: 6536 - RNA, 19 nt, Artificial sequence
  specific aptamers
gguguggagaggaguggug

SEQ ID NO: 6537 - RNA, 20 nt, Artificial sequence
  specific aptamers
gguguggagagguagaggag

SEQ ID NO: 6538 - RNA, 20 nt, Artificial sequence
  specific aptamers
gguguggagagguagaggcg

SEQ ID NO: 6539 - RNA, 20 nt, Artificial sequence
  specific aptamers
gguguggagagguagaggug

SEQ ID NO: 6540 - RNA, 20 nt, Artificial sequence
  specific aptamers
gguguggagagguagcggag

SEQ ID NO: 6541 - RNA, 20 nt, Artificial sequence
  specific aptamers
gguguggagagguagcggcg

SEQ ID NO: 6542 - RNA, 20 nt, Artificial sequence
  specific aptamers
gguguggagagguagcggug

SEQ ID NO: 6543 - RNA, 20 nt, Artificial sequence
  specific aptamers
gguguggagagguaguggag

SEQ ID NO: 6544 - RNA, 20 nt, Artificial sequence
  specific aptamers
gguguggagagguaguggcg

SEQ ID NO: 6545 - RNA, 20 nt, Artificial sequence
  specific aptamers
gguguggagagguaguggug

SEQ ID NO: 6546 - RNA, 20 nt, Artificial sequence
  specific aptamers
gguguggagagguugaggag

SEQ ID NO: 6547 - RNA, 20 nt, Artificial sequence
  specific aptamers
gguguggagagguugaggcg

SEQ ID NO: 6548 - RNA, 20 nt, Artificial sequence
  specific aptamers
gguguggagagguugaggug

SEQ ID NO: 6549 - RNA, 20 nt, Artificial sequence
  specific aptamers
gguguggagagguugcggag

SEQ ID NO: 6550 - RNA, 20 nt, Artificial sequence
  specific aptamers
gguguggagagguugcggcg

SEQ ID NO: 6551 - RNA, 20 nt, Artificial sequence
  specific aptamers
gguguggagagguugcggug

SEQ ID NO: 6552 - RNA, 20 nt, Artificial sequence
  specific aptamers
gguguggagagguuguggag

SEQ ID NO: 6553 - RNA, 20 nt, Artificial sequence
  specific aptamers
gguguggagagguuguggcg

SEQ ID NO: 6554 - RNA, 20 nt, Artificial sequence
  specific aptamers
gguguggagagguuguggug

SEQ ID NO: 6555 - RNA, 19 nt, Artificial sequence
  specific aptamers
gguguggagaggugaggag

SEQ ID NO: 6556 - RNA, 19 nt, Artificial sequence
  specific aptamers
gguguggagaggugaggcg

SEQ ID NO: 6557 - RNA, 19 nt, Artificial sequence
  specific aptamers
gguguggagaggugaggug

SEQ ID NO: 6558 - RNA, 19 nt, Artificial sequence
  specific aptamers
gguguggagaggugcggag

SEQ ID NO: 6559 - RNA, 19 nt, Artificial sequence
  specific aptamers
gguguggagaggugcggcg

SEQ ID NO: 6560 - RNA, 19 nt, Artificial sequence
  specific aptamers
gguguggagaggugcggug

SEQ ID NO: 6561 - RNA, 19 nt, Artificial sequence
  specific aptamers
gguguggagagguguggag

SEQ ID NO: 6562 - RNA, 19 nt, Artificial sequence
  specific aptamers
gguguggagagguguggcg

SEQ ID NO: 6563 - RNA, 19 nt, Artificial sequence
  specific aptamers
gguguggagagguguggug

SEQ ID NO: 6564 - RNA, 20 nt, Artificial sequence
  specific aptamers
gguguggaguggaagaggag

SEQ ID NO: 6565 - RNA, 20 nt, Artificial sequence
  specific aptamers
gguguggaguggaagaggcg

SEQ ID NO: 6566 - RNA, 20 nt, Artificial sequence
  specific aptamers
gguguggaguggaagaggug

SEQ ID NO: 6567 - RNA, 20 nt, Artificial sequence
  specific aptamers
gguguggaguggaagcggag

SEQ ID NO: 6568 - RNA, 20 nt, Artificial sequence
  specific aptamers
gguguggaguggaagcggcg

SEQ ID NO: 6569 - RNA, 20 nt, Artificial sequence
  specific aptamers
gguguggaguggaagcggug

SEQ ID NO: 6570 - RNA, 20 nt, Artificial sequence
  specific aptamers
gguguggaguggaaguggag

SEQ ID NO: 6571 - RNA, 20 nt, Artificial sequence
  specific aptamers
gguguggaguggaaguggcg

SEQ ID NO: 6572 - RNA, 20 nt, Artificial sequence
  specific aptamers
gguguggaguggaaguggug

SEQ ID NO: 6573 - RNA, 20 nt, Artificial sequence
  specific aptamers
gguguggaguggaugaggag

SEQ ID NO: 6574 - RNA, 20 nt, Artificial sequence
  specific aptamers
gguguggaguggaugaggcg

SEQ ID NO: 6575 - RNA, 20 nt, Artificial sequence
  specific aptamers
gguguggaguggaugaggug

SEQ ID NO: 6576 - RNA, 20 nt, Artificial sequence
  specific aptamers
gguguggaguggaugcggag

SEQ ID NO: 6577 - RNA, 20 nt, Artificial sequence
  specific aptamers
gguguggaguggaugcggcg

SEQ ID NO: 6578 - RNA, 20 nt, Artificial sequence
  specific aptamers
gguguggaguggaugcggug

SEQ ID NO: 6579 - RNA, 20 nt, Artificial sequence
  specific aptamers
gguguggaguggauguggag

SEQ ID NO: 6580 - RNA, 20 nt, Artificial sequence
  specific aptamers
gguguggaguggauguggcg

SEQ ID NO: 6581 - RNA, 20 nt, Artificial sequence
  specific aptamers
gguguggaguggauguggug

SEQ ID NO: 6582 - RNA, 19 nt, Artificial sequence
  specific aptamers
gguguggaguggagaggag

SEQ ID NO: 6583 - RNA, 19 nt, Artificial sequence
  specific aptamers
gguguggaguggagaggcg

SEQ ID NO: 6584 - RNA, 19 nt, Artificial sequence
  specific aptamers
gguguggaguggagaggug

SEQ ID NO: 6585 - RNA, 19 nt, Artificial sequence
  specific aptamers
gguguggaguggagcggag

SEQ ID NO: 6586 - RNA, 19 nt, Artificial sequence
  specific aptamers
gguguggaguggagcggcg

SEQ ID NO: 6587 - RNA, 19 nt, Artificial sequence
  specific aptamers
gguguggaguggagcggug

SEQ ID NO: 6588 - RNA, 19 nt, Artificial sequence
  specific aptamers
gguguggaguggaguggag

SEQ ID NO: 6589 - RNA, 19 nt, Artificial sequence
  specific aptamers
gguguggaguggaguggcg

SEQ ID NO: 6590 - RNA, 19 nt, Artificial sequence
  specific aptamers
gguguggaguggaguggug

SEQ ID NO: 6591 - RNA, 20 nt, Artificial sequence
  specific aptamers
gguguggagugguagaggag

SEQ ID NO: 6592 - RNA, 20 nt, Artificial sequence
  specific aptamers
gguguggagugguagaggcg

SEQ ID NO: 6593 - RNA, 20 nt, Artificial sequence
  specific aptamers
gguguggagugguagaggug

SEQ ID NO: 6594 - RNA, 20 nt, Artificial sequence
  specific aptamers
gguguggagugguagcggag

SEQ ID NO: 6595 - RNA, 20 nt, Artificial sequence
  specific aptamers
gguguggagugguagcggcg

SEQ ID NO: 6596 - RNA, 20 nt, Artificial sequence
  specific aptamers
gguguggagugguagcggug

SEQ ID NO: 6597 - RNA, 20 nt, Artificial sequence
  specific aptamers
gguguggagugguaguggag

SEQ ID NO: 6598 - RNA, 20 nt, Artificial sequence
  specific aptamers
gguguggagugguaguggcg

SEQ ID NO: 6599 - RNA, 20 nt, Artificial sequence
  specific aptamers
gguguggagugguaguggug

SEQ ID NO: 6600 - RNA, 20 nt, Artificial sequence
  specific aptamers
gguguggagugguugaggag

SEQ ID NO: 6601 - RNA, 20 nt, Artificial sequence
  specific aptamers
gguguggagugguugaggcg

SEQ ID NO: 6602 - RNA, 20 nt, Artificial sequence
  specific aptamers
gguguggagugguugaggug

SEQ ID NO: 6603 - RNA, 20 nt, Artificial sequence
  specific aptamers
gguguggagugguugcggag

SEQ ID NO: 6604 - RNA, 20 nt, Artificial sequence
  specific aptamers
gguguggagugguugcggcg

SEQ ID NO: 6605 - RNA, 20 nt, Artificial sequence
  specific aptamers
gguguggagugguugcggug

SEQ ID NO: 6606 - RNA, 20 nt, Artificial sequence
  specific aptamers
gguguggagugguuguggag

SEQ ID NO: 6607 - RNA, 20 nt, Artificial sequence
  specific aptamers
gguguggagugguuguggcg

SEQ ID NO: 6608 - RNA, 20 nt, Artificial sequence
  specific aptamers
gguguggagugguuguggug

SEQ ID NO: 6609 - RNA, 19 nt, Artificial sequence
  specific aptamers
gguguggaguggugaggag

SEQ ID NO: 6610 - RNA, 19 nt, Artificial sequence
  specific aptamers
gguguggaguggugaggcg

SEQ ID NO: 6611 - RNA, 19 nt, Artificial sequence
  specific aptamers
gguguggaguggugaggug

SEQ ID NO: 6612 - RNA, 19 nt, Artificial sequence
  specific aptamers
gguguggaguggugcggag

SEQ ID NO: 6613 - RNA, 19 nt, Artificial sequence
  specific aptamers
gguguggaguggugcggcg

SEQ ID NO: 6614 - RNA, 19 nt, Artificial sequence
  specific aptamers
gguguggaguggugcggug

SEQ ID NO: 6615 - RNA, 19 nt, Artificial sequence
  specific aptamers
gguguggagugguguggag

SEQ ID NO: 6616 - RNA, 19 nt, Artificial sequence
  specific aptamers
gguguggagugguguggcg

SEQ ID NO: 6617 - RNA, 19 nt, Artificial sequence
  specific aptamers
gguguggagugguguggug

SEQ ID NO: 6618 - RNA, 20 nt, Artificial sequence
  specific aptamers
gguguggugaggaagaggag

SEQ ID NO: 6619 - RNA, 20 nt, Artificial sequence
  specific aptamers
gguguggugaggaagaggcg

SEQ ID NO: 6620 - RNA, 20 nt, Artificial sequence
  specific aptamers
gguguggugaggaagaggug

SEQ ID NO: 6621 - RNA, 20 nt, Artificial sequence
  specific aptamers
gguguggugaggaagcggag

SEQ ID NO: 6622 - RNA, 20 nt, Artificial sequence
  specific aptamers
gguguggugaggaagcggcg

SEQ ID NO: 6623 - RNA, 20 nt, Artificial sequence
  specific aptamers
gguguggugaggaagcggug

SEQ ID NO: 6624 - RNA, 20 nt, Artificial sequence
  specific aptamers
gguguggugaggaaguggag

SEQ ID NO: 6625 - RNA, 20 nt, Artificial sequence
  specific aptamers
gguguggugaggaaguggcg

SEQ ID NO: 6626 - RNA, 20 nt, Artificial sequence
  specific aptamers
gguguggugaggaaguggug

SEQ ID NO: 6627 - RNA, 20 nt, Artificial sequence
  specific aptamers
gguguggugaggaugaggag

SEQ ID NO: 6628 - RNA, 20 nt, Artificial sequence
  specific aptamers
gguguggugaggaugaggcg

SEQ ID NO: 6629 - RNA, 20 nt, Artificial sequence
  specific aptamers
gguguggugaggaugaggug

SEQ ID NO: 6630 - RNA, 20 nt, Artificial sequence
  specific aptamers
gguguggugaggaugcggag

SEQ ID NO: 6631 - RNA, 20 nt, Artificial sequence
  specific aptamers
gguguggugaggaugcggcg

SEQ ID NO: 6632 - RNA, 20 nt, Artificial sequence
  specific aptamers
gguguggugaggaugcggug

SEQ ID NO: 6633 - RNA, 20 nt, Artificial sequence
  specific aptamers
gguguggugaggauguggag

SEQ ID NO: 6634 - RNA, 20 nt, Artificial sequence
  specific aptamers
gguguggugaggauguggcg

SEQ ID NO: 6635 - RNA, 20 nt, Artificial sequence
  specific aptamers
gguguggugaggauguggug

SEQ ID NO: 6636 - RNA, 19 nt, Artificial sequence
  specific aptamers
gguguggugaggagaggag

SEQ ID NO: 6637 - RNA, 19 nt, Artificial sequence
  specific aptamers
gguguggugaggagaggcg

SEQ ID NO: 6638 - RNA, 19 nt, Artificial sequence
  specific aptamers
gguguggugaggagaggug

SEQ ID NO: 6639 - RNA, 19 nt, Artificial sequence
  specific aptamers
gguguggugaggagcggag

SEQ ID NO: 6640 - RNA, 19 nt, Artificial sequence
  specific aptamers
gguguggugaggagcggcg

SEQ ID NO: 6641 - RNA, 19 nt, Artificial sequence
  specific aptamers
gguguggugaggagcggug

SEQ ID NO: 6642 - RNA, 19 nt, Artificial sequence
  specific aptamers
gguguggugaggaguggag

SEQ ID NO: 6643 - RNA, 19 nt, Artificial sequence
  specific aptamers
gguguggugaggaguggcg

SEQ ID NO: 6644 - RNA, 19 nt, Artificial sequence
  specific aptamers
gguguggugaggaguggug

SEQ ID NO: 6645 - RNA, 20 nt, Artificial sequence
  specific aptamers
gguguggugagguagaggag

SEQ ID NO: 6646 - RNA, 20 nt, Artificial sequence
  specific aptamers
gguguggugagguagaggcg

SEQ ID NO: 6647 - RNA, 20 nt, Artificial sequence
  specific aptamers
gguguggugagguagaggug

SEQ ID NO: 6648 - RNA, 20 nt, Artificial sequence
  specific aptamers
gguguggugagguagcggag

SEQ ID NO: 6649 - RNA, 20 nt, Artificial sequence
  specific aptamers
gguguggugagguagcggcg

SEQ ID NO: 6650 - RNA, 20 nt, Artificial sequence
  specific aptamers
gguguggugagguagcggug

SEQ ID NO: 6651 - RNA, 20 nt, Artificial sequence
  specific aptamers
gguguggugagguaguggag

SEQ ID NO: 6652 - RNA, 20 nt, Artificial sequence
  specific aptamers
gguguggugagguaguggcg

SEQ ID NO: 6653 - RNA, 20 nt, Artificial sequence
  specific aptamers
gguguggugagguaguggug

SEQ ID NO: 6654 - RNA, 20 nt, Artificial sequence
  specific aptamers
gguguggugagguugaggag

SEQ ID NO: 6655 - RNA, 20 nt, Artificial sequence
  specific aptamers
gguguggugagguugaggcg

SEQ ID NO: 6656 - RNA, 20 nt, Artificial sequence
  specific aptamers
gguguggugagguugaggug

SEQ ID NO: 6657 - RNA, 20 nt, Artificial sequence
  specific aptamers
gguguggugagguugcggag

SEQ ID NO: 6658 - RNA, 20 nt, Artificial sequence
  specific aptamers
gguguggugagguugcggcg

SEQ ID NO: 6659 - RNA, 20 nt, Artificial sequence
  specific aptamers
gguguggugagguugcggug

SEQ ID NO: 6660 - RNA, 20 nt, Artificial sequence
  specific aptamers
gguguggugagguuguggag

SEQ ID NO: 6661 - RNA, 20 nt, Artificial sequence
  specific aptamers
gguguggugagguuguggcg

SEQ ID NO: 6662 - RNA, 20 nt, Artificial sequence
  specific aptamers
gguguggugagguuguggug

SEQ ID NO: 6663 - RNA, 19 nt, Artificial sequence
  specific aptamers
gguguggugaggugaggag

SEQ ID NO: 6664 - RNA, 19 nt, Artificial sequence
  specific aptamers
gguguggugaggugaggcg

SEQ ID NO: 6665 - RNA, 19 nt, Artificial sequence
  specific aptamers
gguguggugaggugaggug

SEQ ID NO: 6666 - RNA, 19 nt, Artificial sequence
  specific aptamers
gguguggugaggugcggag

SEQ ID NO: 6667 - RNA, 19 nt, Artificial sequence
  specific aptamers
gguguggugaggugcggcg

SEQ ID NO: 6668 - RNA, 19 nt, Artificial sequence
  specific aptamers
gguguggugaggugcggug

SEQ ID NO: 6669 - RNA, 19 nt, Artificial sequence
  specific aptamers
gguguggugagguguggag

SEQ ID NO: 6670 - RNA, 19 nt, Artificial sequence
  specific aptamers
gguguggugagguguggcg

SEQ ID NO: 6671 - RNA, 19 nt, Artificial sequence
  specific aptamers
gguguggugagguguggug

SEQ ID NO: 6672 - RNA, 20 nt, Artificial sequence
  specific aptamers
ggugugguguggaagaggag

SEQ ID NO: 6673 - RNA, 20 nt, Artificial sequence
  specific aptamers
ggugugguguggaagaggcg

SEQ ID NO: 6674 - RNA, 20 nt, Artificial sequence
  specific aptamers
ggugugguguggaagaggug

SEQ ID NO: 6675 - RNA, 20 nt, Artificial sequence
  specific aptamers
ggugugguguggaagcggag

SEQ ID NO: 6676 - RNA, 20 nt, Artificial sequence
  specific aptamers
ggugugguguggaagcggcg

SEQ ID NO: 6677 - RNA, 20 nt, Artificial sequence
  specific aptamers
ggugugguguggaagcggug

SEQ ID NO: 6678 - RNA, 20 nt, Artificial sequence
  specific aptamers
ggugugguguggaaguggag

SEQ ID NO: 6679 - RNA, 20 nt, Artificial sequence
  specific aptamers
ggugugguguggaaguggcg

SEQ ID NO: 6680 - RNA, 20 nt, Artificial sequence
  specific aptamers
ggugugguguggaaguggug

SEQ ID NO: 6681 - RNA, 20 nt, Artificial sequence
  specific aptamers
ggugugguguggaugaggag

SEQ ID NO: 6682 - RNA, 20 nt, Artificial sequence
  specific aptamers
ggugugguguggaugaggcg

SEQ ID NO: 6683 - RNA, 20 nt, Artificial sequence
  specific aptamers
ggugugguguggaugaggug

SEQ ID NO: 6684 - RNA, 20 nt, Artificial sequence
  specific aptamers
ggugugguguggaugcggag

SEQ ID NO: 6685 - RNA, 20 nt, Artificial sequence
  specific aptamers
ggugugguguggaugcggcg

SEQ ID NO: 6686 - RNA, 20 nt, Artificial sequence
  specific aptamers
ggugugguguggaugcggug

SEQ ID NO: 6687 - RNA, 20 nt, Artificial sequence
  specific aptamers
ggugugguguggauguggag

SEQ ID NO: 6688 - RNA, 20 nt, Artificial sequence
  specific aptamers
ggugugguguggauguggcg

SEQ ID NO: 6689 - RNA, 20 nt, Artificial sequence
  specific aptamers
ggugugguguggauguggug

SEQ ID NO: 6690 - RNA, 19 nt, Artificial sequence
  specific aptamers
ggugugguguggagaggag

SEQ ID NO: 6691 - RNA, 19 nt, Artificial sequence
  specific aptamers
ggugugguguggagaggcg

SEQ ID NO: 6692 - RNA, 19 nt, Artificial sequence
  specific aptamers
ggugugguguggagaggug

SEQ ID NO: 6693 - RNA, 19 nt, Artificial sequence
  specific aptamers
ggugugguguggagcggag

SEQ ID NO: 6694 - RNA, 19 nt, Artificial sequence
  specific aptamers
ggugugguguggagcggcg

SEQ ID NO: 6695 - RNA, 19 nt, Artificial sequence
  specific aptamers
ggugugguguggagcggug

SEQ ID NO: 6696 - RNA, 19 nt, Artificial sequence
  specific aptamers
ggugugguguggaguggag

SEQ ID NO: 6697 - RNA, 19 nt, Artificial sequence
  specific aptamers
ggugugguguggaguggcg

SEQ ID NO: 6698 - RNA, 19 nt, Artificial sequence
  specific aptamers
ggugugguguggaguggug

SEQ ID NO: 6699 - RNA, 20 nt, Artificial sequence
  specific aptamers
gguguggugugguagaggag

SEQ ID NO: 6700 - RNA, 20 nt, Artificial sequence
  specific aptamers
gguguggugugguagaggcg

SEQ ID NO: 6701 - RNA, 20 nt, Artificial sequence
  specific aptamers
gguguggugugguagaggug

SEQ ID NO: 6702 - RNA, 20 nt, Artificial sequence
  specific aptamers
gguguggugugguagcggag

SEQ ID NO: 6703 - RNA, 20 nt, Artificial sequence
  specific aptamers
gguguggugugguagcggcg

SEQ ID NO: 6704 - RNA, 20 nt, Artificial sequence
  specific aptamers
gguguggugugguagcggug

SEQ ID NO: 6705 - RNA, 20 nt, Artificial sequence
  specific aptamers
gguguggugugguaguggag

SEQ ID NO: 6706 - RNA, 20 nt, Artificial sequence
  specific aptamers
gguguggugugguaguggcg

SEQ ID NO: 6707 - RNA, 20 nt, Artificial sequence
  specific aptamers
gguguggugugguaguggug

SEQ ID NO: 6708 - RNA, 20 nt, Artificial sequence
  specific aptamers
gguguggugugguugaggag

SEQ ID NO: 6709 - RNA, 20 nt, Artificial sequence
  specific aptamers
gguguggugugguugaggcg

SEQ ID NO: 6710 - RNA, 20 nt, Artificial sequence
  specific aptamers
gguguggugugguugaggug

SEQ ID NO: 6711 - RNA, 20 nt, Artificial sequence
  specific aptamers
gguguggugugguugcggag

SEQ ID NO: 6712 - RNA, 20 nt, Artificial sequence
  specific aptamers
gguguggugugguugcggcg

SEQ ID NO: 6713 - RNA, 20 nt, Artificial sequence
  specific aptamers
gguguggugugguugcggug

SEQ ID NO: 6714 - RNA, 20 nt, Artificial sequence
  specific aptamers
gguguggugugguuguggag

SEQ ID NO: 6715 - RNA, 20 nt, Artificial sequence
  specific aptamers
gguguggugugguuguggcg

SEQ ID NO: 6716 - RNA, 20 nt, Artificial sequence
  specific aptamers
gguguggugugguuguggug

SEQ ID NO: 6717 - RNA, 19 nt, Artificial sequence
  specific aptamers
ggugugguguggugaggag

SEQ ID NO: 6718 - RNA, 19 nt, Artificial sequence
  specific aptamers
ggugugguguggugaggcg

SEQ ID NO: 6719 - RNA, 19 nt, Artificial sequence
  specific aptamers
ggugugguguggugaggug

SEQ ID NO: 6720 - RNA, 19 nt, Artificial sequence
  specific aptamers
ggugugguguggugcggag

SEQ ID NO: 6721 - RNA, 19 nt, Artificial sequence
  specific aptamers
ggugugguguggugcggcg

SEQ ID NO: 6722 - RNA, 19 nt, Artificial sequence
  specific aptamers
ggugugguguggugcggug

SEQ ID NO: 6723 - RNA, 19 nt, Artificial sequence
  specific aptamers
gguguggugugguguggag

SEQ ID NO: 6724 - RNA, 19 nt, Artificial sequence
  specific aptamers
gguguggugugguguggcg

SEQ ID NO: 6725 - RNA, 19 nt, Artificial sequence
  specific aptamers
gguguggugugguguggug

SEQ ID NO: 6726 - RNA, 45 nt, Artificial sequence
  specific aptamers
ggcacguacgaaggaagguuugguaugugguauauucguacgugc

SEQ ID NO: 6727 - RNA, 45 nt, Artificial sequence
  specific aptamers
ggcacguacgaaggaaggauugguaugugguauauucguacgugc

SEQ ID NO: 6728 - RNA, 45 nt, Artificial sequence
  specific aptamers
ggcacguacgaaggaagguuugguaagugguauauucguacgugc

SEQ ID NO: 6729 - RNA, 23 nt, Artificial sequence
  specific aptamers
ggaagguuugguaagugguauau

SEQ ID NO: 6730 - RNA, 45 nt, Artificial sequence
  specific aptamers
ggcacguacgaaggaaggauugguaagugguauauucguacgugc

SEQ ID NO: 6731 - RNA, 23 nt, Artificial sequence
  specific aptamers
ggaaggauugguaagugguauau

SEQ ID NO: 6732 - RNA, 45 nt, Artificial sequence
  specific aptamers
ggcacguacgaaggaaggauugguacgugguauauucguacgugc

SEQ ID NO: 6733 - RNA, 23 nt, Artificial sequence
  specific aptamers
ggaaggauugguacgugguauau

SEQ ID NO: 6734 - RNA, 45 nt, Artificial sequence
  specific aptamers
ggcacguacgaaggaaggguugguaugugguauauucguacgugc

SEQ ID NO: 6735 - RNA, 23 nt, Artificial sequence
  specific aptamers
ggaaggguugguaugugguauau

SEQ ID NO: 6736 - RNA, 45 nt, Artificial sequence
  specific aptamers
ggcacguacgaaggaagguuugguaggugguauauucguacgugc

SEQ ID NO: 6737 - RNA, 23 nt, Artificial sequence
  specific aptamers
ggaagguuugguaggugguauau

SEQ ID NO: 6738 - RNA, 45 nt, Artificial sequence
  specific aptamers
ggcacguacgaaggaaggauugguaggugguauauucguacgugc

SEQ ID NO: 6739 - RNA, 23 nt, Artificial sequence
  specific aptamers
ggaaggauugguaggugguauau

SEQ ID NO: 6740 - RNA, 45 nt, Artificial sequence
  specific aptamers
ggcacguacgaaggaaggcuugguacgugguauauucguacgugc

SEQ ID NO: 6741 - RNA, 23 nt, Artificial sequence
  specific aptamers
ggaaggcuugguacgugguauau

SEQ ID NO: 6742 - RNA, 45 nt, Artificial sequence
  specific aptamers
ggcacguacgaaggaaggguugguaggugguauauucguacgugc

SEQ ID NO: 6743 - RNA, 23 nt, Artificial sequence
  specific aptamers
ggaaggguugguaggugguauau

SEQ ID NO: 6744 - RNA, 45 nt, Artificial sequence
  specific aptamers
ggcacguacgaaggaaggguugguaagugguauauucguacgugc

SEQ ID NO: 6745 - RNA, 23 nt, Artificial sequence
  specific aptamers
ggaaggguugguaagugguauau

SEQ ID NO: 6746 - RNA, 45 nt, Artificial sequence
  specific aptamers
ggcacguacgaaggaaggguugguacgugguauauucguacgugc

SEQ ID NO: 6747 - RNA, 23 nt, Artificial sequence
  specific aptamers
ggaaggguugguacgugguauau

SEQ ID NO: 6748 - RNA, 45 nt, Artificial sequence
  specific aptamers
ggcacguacgaaggaaggcuugguaugugguauauucguacgugc

SEQ ID NO: 6749 - RNA, 23 nt, Artificial sequence
  specific aptamers
ggaaggcuugguaugugguauau

SEQ ID NO: 6750 - RNA, 45 nt, Artificial sequence
  specific aptamers
ggcacguacgaaggaagguuugguacgugguauauucguacgugc

SEQ ID NO: 6751 - RNA, 23 nt, Artificial sequence
  specific aptamers
ggaagguuugguacgugguauau

SEQ ID NO: 6752 - RNA, 45 nt, Artificial sequence
  specific aptamers
ggcacguacgaaggaaggcuugguaagugguauauucguacgugc

SEQ ID NO: 6753 - RNA, 23 nt, Artificial sequence
  specific aptamers
ggaaggcuugguaagugguauau

SEQ ID NO: 6754 - RNA, 45 nt, Artificial sequence
  specific aptamers
ggcacguacgaaggaaggcuugguaggugguauauucguacgugc

SEQ ID NO: 6755 - RNA, 23 nt, Artificial sequence
  specific aptamers
ggaaggcuugguaggugguauau

SEQ ID NO: 6756 - RNA, 53 nt, Artificial sequence
  specific aptamers
ggaagaaugaaggaagguuugguaugggguaguugucauucuucccauguuug

SEQ ID NO: 6757 - RNA, 53 nt, Artificial sequence
  specific aptamers
ggaagaaugaaggacgguuugguaugugguaguggucauucuucccauguuug

SEQ ID NO: 6758 - RNA, 45 nt, Artificial sequence
  specific aptamers
ggcacguacgaaggaaggauugguaugugguacauucguacgugc

SEQ ID NO: 6759 - RNA, 45 nt, Artificial sequence
  specific aptamers
ggcacguacgaaggaaggauugguauguggcauauucguacgugc

SEQ ID NO: 6760 - RNA, 23 nt, Artificial sequence
  specific aptamers
ggaaggauugguauguggcauau

SEQ ID NO: 6761 - RNA, 45 nt, Artificial sequence
  specific aptamers
ggcacguacgaaggaaggauuggcaugugguauauucguacgugc

SEQ ID NO: 6762 - RNA, 44 nt, Artificial sequence
  specific aptamers
ggcacguacgaaggaaggaugguaugugguauauucguacgugc

SEQ ID NO: 6763 - RNA, 23 nt, Artificial sequence
  specific aptamers
ggaaggaugguaugugguauauu

SEQ ID NO: 6764 - RNA, 45 nt, Artificial sequence
  specific aptamers
ggcacguacgaaggaaggaucgguaugugguauauucguacgugc

SEQ ID NO: 6765 - RNA, 23 nt, Artificial sequence
  specific aptamers
aggaaggaucgguaugugguaua

SEQ ID NO: 6766 - RNA, 45 nt, Artificial sequence
  specific aptamers
ggcacguacgaaggaaggauagguaugugguauauucguacgugc

SEQ ID NO: 6767 - RNA, 23 nt, Artificial sequence
  specific aptamers
ggaaggauagguaugugguauau

SEQ ID NO: 6768 - RNA, 45 nt, Artificial sequence
  specific aptamers
ggcacguaccuaggaaggauugguaugugguauauagguacgugc

SEQ ID NO: 6769 - RNA, 45 nt, Artificial sequence
  specific aptamers
ggcacguacgagggaaggauugguaugugguauacucguacgugc

SEQ ID NO: 6770 - RNA, 23 nt, Artificial sequence
  specific aptamers
ggaaggauugguaugugguauac

SEQ ID NO: 6771 - RNA, 45 nt, Artificial sequence
  specific aptamers
ggcacguacgacggaaggauugguaugugguauagucguacgugc

SEQ ID NO: 6772 - RNA, 23 nt, Artificial sequence
  specific aptamers
ggaaggauugguaugugguauag

SEQ ID NO: 6773 - RNA, 45 nt, Artificial sequence
  specific aptamers
ggcacguacgauggaaggauugguaugugguauaaucguacgugc

SEQ ID NO: 6774 - RNA, 45 nt, Artificial sequence
  specific aptamers
ggcacguacgaaggaaggauugguaugugguauaaucguacgugc

SEQ ID NO: 6775 - RNA, 45 nt, Artificial sequence
  specific aptamers
ggcacguacgaaggaaggauuggaaugugguauauucguacgugc

SEQ ID NO: 6776 - RNA, 45 nt, Artificial sequence
  specific aptamers
ggcacguacgaaggaaggauugguauguggaauauucguacgugc

SEQ ID NO: 6777 - RNA, 23 nt, Artificial sequence
  specific aptamers
ggaaggauugguauguggaauau

SEQ ID NO: 6778 - RNA, 45 nt, Artificial sequence
  specific aptamers
ggcacguacgaaggaaggauuggaauguggaauauucguacgugc

SEQ ID NO: 6779 - RNA, 23 nt, Artificial sequence
  specific aptamers
ggaaggauuggaauguggaauau

SEQ ID NO: 6780 - RNA, 45 nt, Artificial sequence
  specific aptamers
ggcacguacgaaggaaggauugguaugugguaaauucguacgugc

SEQ ID NO: 6781 - RNA, 45 nt, Artificial sequence
  specific aptamers
ggcacguacgaaggaaggauugguaugugauauauucguacgugc

SEQ ID NO: 6782 - RNA, 23 nt, Artificial sequence
  specific aptamers
ggaaggauugguaugugauauau

SEQ ID NO: 6783 - RNA, 43 nt, Artificial sequence
  specific aptamers
ggcacguacgaaggaaggauugguauguguuauucguacgugc

SEQ ID NO: 6784 - RNA, 23 nt, Artificial sequence
  specific aptamers
ggaaggauugguauguguuauuc

SEQ ID NO: 6785 - RNA, 44 nt, Artificial sequence
  specific aptamers
ggcacguacgaaggaggauugguaugugguauauucguacgugc

SEQ ID NO: 6786 - RNA, 23 nt, Artificial sequence
  specific aptamers
ggaggauugguaugugguauauu

SEQ ID NO: 6787 - RNA, 45 nt, Artificial sequence
  specific aptamers
ggcacguacgaaggaaggauugguuugugguauauucguacgugc

SEQ ID NO: 6788 - RNA, 23 nt, Artificial sequence
  specific aptamers
ggaaggauugguuugugguauau

SEQ ID NO: 6789 - RNA, 45 nt, Artificial sequence
  specific aptamers
ggcacguacgaaggaaggauugguaugugguuuauucguacgugc

SEQ ID NO: 6790 - RNA, 23 nt, Artificial sequence
  specific aptamers
ggaaggauugguaugugguuuau

SEQ ID NO: 6791 - RNA, 45 nt, Artificial sequence
  specific aptamers
ggcacguacgaaggaaggauugguuuguguuuuauucguacgugc

SEQ ID NO: 6792 - RNA, 23 nt, Artificial sequence
  specific aptamers
ggaaggauugguuuguguuuuau

SEQ ID NO: 6793 - RNA, 45 nt, Artificial sequence
  specific aptamers
ggcacguacgaaggaaggauugguuugugguuuauucguacgugc

SEQ ID NO: 6794 - RNA, 23 nt, Artificial sequence
  specific aptamers
ggaaggauugguuugugguuuau

SEQ ID NO: 6795 - RNA, 22 nt, Artificial sequence
  specific aptamers
ggaugguuugguaugagguagg

SEQ ID NO: 6796 - RNA, 22 nt, Artificial sequence
  specific aptamers
ggaaggcuugguaagugguaua

SEQ ID NO: 6797 - RNA, 23 nt, Artificial sequence
  specific aptamers
ggaggguuggguaaguguuaaug

SEQ ID NO: 6798 - RNA, 23 nt, Artificial sequence
  specific aptamers
ggacgguuugguaugggguagug

SEQ ID NO: 6799 - RNA, 23 nt, Artificial sequence
  specific aptamers
ggaggguuugguaugagguaguu

SEQ ID NO: 6800 - RNA, 23 nt, Artificial sequence
  specific aptamers
ggacgguuugguaugagguagug

SEQ ID NO: 6801 - RNA, 23 nt, Artificial sequence
  specific aptamers
ggaagguuagguaagggauagag

SEQ ID NO: 6802 - RNA, 22 nt, Artificial sequence
  specific aptamers
ggaugguuugguaugugguaga

SEQ ID NO: 6803 - RNA, 23 nt, Artificial sequence
  specific aptamers
ggaugguuugguaugagguaggu

SEQ ID NO: 6804 - RNA, 23 nt, Artificial sequence
  specific aptamers
ggaggguuugguaugagguaugc

SEQ ID NO: 6805 - RNA, 22 nt, Artificial sequence
  specific aptamers
ggaagguuugguaugagguagg

SEQ ID NO: 6806 - RNA, 22 nt, Artificial sequence
  specific aptamers
ggaagguuugguaugagguaga

SEQ ID NO: 6807 - RNA, 24 nt, Artificial sequence
  specific aptamers
cgaaggagaggagaggaagaggag

SEQ ID NO: 6808 - RNA, 24 nt, Artificial sequence
  specific aptamers
cgcaggagaggagaggaagaggag

SEQ ID NO: 6809 - RNA, 24 nt, Artificial sequence
  specific aptamers
cggaggagaggagaggaagaggag

SEQ ID NO: 6810 - RNA, 24 nt, Artificial sequence
  specific aptamers
cguaggagaggagaggaagaggag

SEQ ID NO: 6811 - RNA, 24 nt, Artificial sequence
  specific aptamers
cgagggagaggagaggaagaggag

SEQ ID NO: 6812 - RNA, 24 nt, Artificial sequence
  specific aptamers
cgcgggagaggagaggaagaggag

SEQ ID NO: 6813 - RNA, 24 nt, Artificial sequence
  specific aptamers
cgggggagaggagaggaagaggag

SEQ ID NO: 6814 - RNA, 24 nt, Artificial sequence
  specific aptamers
cgugggagaggagaggaagaggag

SEQ ID NO: 6815 - RNA, 29 nt, Artificial sequence
  specific aptamers
accgagggaguggugaggaugaggcgagu

SEQ ID NO: 6816 - RNA, 37 nt, Artificial sequence
  specific aptamers
gcguagcgagggaguggugaggaugaggcgacuacgc

SEQ ID NO: 6817 - RNA, 36 nt, Artificial sequence
  specific aptamers
gcguagcgagggaguggugaggaugaggcgcuacgc

SEQ ID NO: 6818 - RNA, 27 nt, Artificial sequence
  specific aptamers
agggaagguuugguaugggguaguuau

SEQ ID NO: 6819 - RNA, 27 nt, Artificial sequence
  specific aptamers
aaggaagguuugguaugggguaguugu

SEQ ID NO: 6820 - RNA, 27 nt, Artificial sequence
  specific aptamers
agggaagguuugguaugggguaguugu

SEQ ID NO: 6821 - RNA, 27 nt, Artificial sequence
  specific aptamers
agggaagguuugguaugggguaguuuu

SEQ ID NO: 6822 - RNA, 27 nt, Artificial sequence
  specific aptamers
auggaagguuugguaugggguaguugu

SEQ ID NO: 6823 - RNA, 27 nt, Artificial sequence
  specific aptamers
aaggaagguuugguaugggguaguuau

SEQ ID NO: 6824 - RNA, 27 nt, Artificial sequence
  specific aptamers
acggaagguuugguaugggguaguuau

SEQ ID NO: 6825 - RNA, 27 nt, Artificial sequence
  specific aptamers
acggaagguuugguaugggguaguuuu

SEQ ID NO: 6826 - RNA, 27 nt, Artificial sequence
  specific aptamers
acggaagguuugguaugggguaguugu

SEQ ID NO: 6827 - RNA, 27 nt, Artificial sequence
  specific aptamers
agggaagguuugguaugggguaguucu

SEQ ID NO: 6828 - RNA, 27 nt, Artificial sequence
  specific aptamers
aaggaagguuugguaugggguaguuuu

SEQ ID NO: 6829 - RNA, 27 nt, Artificial sequence
  specific aptamers
auggaagguuugguaugggguaguuau

SEQ ID NO: 6830 - RNA, 45 nt, Artificial sequence; identical to SEQ ID NO: 6727
  Mango III aptamer

SEQ ID NO: 6831 - RNA, 45 nt, Artificial sequence; identical to SEQ ID NO: 6732
  Mango III aptamer

SEQ ID NO: 6832 - RNA, 45 nt, Artificial sequence; identical to SEQ ID NO: 6738
  Mango III aptamer

SEQ ID NO: 6833 - RNA, 45 nt, Artificial sequence; identical to SEQ ID NO: 6730
  Mango III aptamer

SEQ ID NO: 6834 - RNA, 45 nt, Artificial sequence; identical to SEQ ID NO: 6748
  Mango III aptamer

SEQ ID NO: 6835 - RNA, 45 nt, Artificial sequence; identical to SEQ ID NO: 6740
  Mango III aptamer

SEQ ID NO: 6836 - RNA, 45 nt, Artificial sequence; identical to SEQ ID NO: 6754
  Mango III aptamer

SEQ ID NO: 6837 - RNA, 45 nt, Artificial sequence; identical to SEQ ID NO: 6752
  Mango III aptamer

SEQ ID NO: 6838 - RNA, 45 nt, Artificial sequence; identical to SEQ ID NO: 6734
  Mango III aptamer

SEQ ID NO: 6839 - RNA, 45 nt, Artificial sequence; identical to SEQ ID NO: 6746
  Mango III aptamer

SEQ ID NO: 6840 - RNA, 45 nt, Artificial sequence; identical to SEQ ID NO: 6742
  Mango III aptamer

SEQ ID NO: 6841 - RNA, 45 nt, Artificial sequence; identical to SEQ ID NO: 6744
  Mango III aptamer

SEQ ID NO: 6842 - RNA, 45 nt, Artificial sequence; identical to SEQ ID NO: 6726
  Mango III aptamer

SEQ ID NO: 6843 - RNA, 45 nt, Artificial sequence; identical to SEQ ID NO: 6750
  Mango III aptamer

SEQ ID NO: 6844 - RNA, 45 nt, Artificial sequence; identical to SEQ ID NO: 6736
  Mango III aptamer

SEQ ID NO: 6845 - RNA, 45 nt, Artificial sequence; identical to SEQ ID NO: 6728
  Mango III aptamer

SEQ ID NO: 6846 - RNA, 45 nt, Artificial sequence; identical to SEQ ID NO: 6727
  Mango III aptamer

SEQ ID NO: 6847 - RNA, 53 nt, Artificial sequence; identical to SEQ ID NO: 6756
  Mango III aptamer

SEQ ID NO: 6848 - RNA, 53 nt, Artificial sequence; identical to SEQ ID NO: 6757
  Mango III aptamer

SEQ ID NO: 6849 - RNA, 45 nt, Artificial sequence
  Mango III aptamer
  misc_feature (32)..(32): n is a, c, g, or u
ggcacguacgaaggaaggauugguauguggunuauucguacgugc

SEQ ID NO: 6850 - RNA, 45 nt, Artificial sequence
  Mango III aptamer
  misc_feature (30)..(30): n is a, c, g, or u
ggcacguacgaaggaaggauugguaugugnuauauucguacgugc

SEQ ID NO: 6851 - RNA, 45 nt, Artificial sequence
  Mango III aptamer
  misc_feature (33)..(33): n is a, c, g, or u
ggcacguacgaaggaaggauugguaugugguanauucguacgugc

SEQ ID NO: 6852 - RNA, 45 nt, Artificial sequence; identical to SEQ ID NO: 6758
  Mango III aptamer

SEQ ID NO: 6853 - RNA, 45 nt, Artificial sequence; identical to SEQ ID NO: 6759
  Mango III aptamer

SEQ ID NO: 6854 - RNA, 45 nt, Artificial sequence; identical to SEQ ID NO: 6761
  Mango III aptamer

SEQ ID NO: 6855 - RNA, 44 nt, Artificial sequence; identical to SEQ ID NO: 6762
  Mango III aptamer

SEQ ID NO: 6856 - RNA, 45 nt, Artificial sequence
  Mango III aptamer
  misc_feature (19)..(19): n is a, c, g, or u
ggcacguacgaaggaaggnuugguaugugguauauucguacgugc

SEQ ID NO: 6857 - RNA, 45 nt, Artificial sequence; identical to SEQ ID NO: 6856
  Mango III aptamer
  misc_feature (19)..(19): n is a, c, g, or u

SEQ ID NO: 6858 - RNA, 45 nt, Artificial sequence; identical to SEQ ID NO: 6764
  Mango III aptamer

SEQ ID NO: 6859 - RNA, 45 nt, Artificial sequence; identical to SEQ ID NO: 6766
  Mango III aptamer

SEQ ID NO: 6860 - RNA, 45 nt, Artificial sequence; identical to SEQ ID NO: 6768
  Mango III aptamer

SEQ ID NO: 6861 - RNA, 45 nt, Artificial sequence; identical to SEQ ID NO: 6769
  Mango III aptamer

SEQ ID NO: 6862 - RNA, 45 nt, Artificial sequence; identical to SEQ ID NO: 6771
  Mango III aptamer

SEQ ID NO: 6863 - RNA, 45 nt, Artificial sequence; identical to SEQ ID NO: 6773
  Mango III aptamer

SEQ ID NO: 6864 - RNA, 45 nt, Artificial sequence; identical to SEQ ID NO: 6774
  Mango III aptamer

SEQ ID NO: 6865 - RNA, 45 nt, Artificial sequence; identical to SEQ ID NO: 6775
  Mango III aptamer

SEQ ID NO: 6866 - RNA, 45 nt, Artificial sequence; identical to SEQ ID NO: 6776
  Mango III aptamer

SEQ ID NO: 6867 - RNA, 45 nt, Artificial sequence; identical to SEQ ID NO: 6778
  Mango III aptamer

SEQ ID NO: 6868 - RNA, 45 nt, Artificial sequence; identical to SEQ ID NO: 6780
  Mango III aptamer

SEQ ID NO: 6869 - RNA, 45 nt, Artificial sequence; identical to SEQ ID NO: 6781
  Mango III aptamer

SEQ ID NO: 6870 - RNA, 43 nt, Artificial sequence; identical to SEQ ID NO: 6783
  Mango III aptamer

SEQ ID NO: 6871 - RNA, 44 nt, Artificial sequence; identical to SEQ ID NO: 6785
  Mango III aptamer

SEQ ID NO: 6872 - RNA, 45 nt, Artificial sequence; identical to SEQ ID NO: 6787
  Mango III aptamer

SEQ ID NO: 6873 - RNA, 45 nt, Artificial sequence; identical to SEQ ID NO: 6789
  Mango III aptamer

SEQ ID NO: 6874 - RNA, 45 nt, Artificial sequence; identical to SEQ ID NO: 6791
  Mango III aptamer

SEQ ID NO: 6875 - RNA, 45 nt, Artificial sequence; identical to SEQ ID NO: 6793
  Mango III aptamer

SEQ ID NO: 6876 - RNA, 41 nt, Artificial sequence
  Mango II aptmer
ggcacguacgaaggagaggagaggaagaggagaguacgugc

SEQ ID NO: 6877 - RNA, 41 nt, Artificial sequence
  Mango II aptmer
ggcacguacgaaggagaggagagguagaggagaguacgugc

SEQ ID NO: 6878 - RNA, 41 nt, Artificial sequence
  Mango II aptmer
ggcacguacgaaggagaggagaggcagaggagaguacgugc

SEQ ID NO: 6879 - RNA, 41 nt, Artificial sequence
  Mango II aptmer
ggcacguacgaaggagaggagagggagaggagaguacgugc

SEQ ID NO: 6880 - RNA, 41 nt, Artificial sequence
  Mango II aptmer
ggcacguacgaaggugaggagaggaagaggagaguacgugc

SEQ ID NO: 6881 - RNA, 41 nt, Artificial sequence
  Mango II aptmer
ggcacguacgaaggagaggugaggaagaggagaguacgugc

SEQ ID NO: 6882 - RNA, 41 nt, Artificial sequence
  Mango II aptmer
ggcacguacgaaggugaggugagguugaggugaguacgugc

SEQ ID NO: 6883 - RNA, 41 nt, Artificial sequence
  Mango II aptmer
ggcacguacgaaggugaggugagguagaggagaguacgugc

SEQ ID NO: 6884 - RNA, 41 nt, Artificial sequence; identical to SEQ ID NO: 6877
  Mango II aptmer

SEQ ID NO: 6885 - RNA, 41 nt, Artificial sequence; identical to SEQ ID NO: 6877
  Mango II aptmer

SEQ ID NO: 6886 - RNA, 41 nt, Artificial sequence; identical to SEQ ID NO: 6877
  Mango II aptmer

SEQ ID NO: 6887 - RNA, 41 nt, Artificial sequence; identical to SEQ ID NO: 6877
  Mango II aptmer

SEQ ID NO: 6888 - RNA, 23 nt, Artificial Sequence
  consensus mango
  misc_feature (2)..(2): n is a, c, g, or u
  misc_feature (7)..(8): n is a, c, g, or u
  misc_feature (11)..(11): n is a, c, g, or u
  misc_feature (13)..(13): n is a, c, g, or u
  misc_feature (18)..(18): n is a, c, g, or u
gnrgggnnggngnggagnggaga

SEQ ID NO: 6889 - DNA, 192 bp, Artificial sequence
  construct table 2
gtctacggccataccaccctgaacgcgcccgatctcgtctgatctcggaagctaagcagggtcgggcctggttagtacttggatgggagaccgcctgggaataccgggtgctgtaggcgtcgacttgccatgtgtatgtggggaaacccacatactctgatgatccttcgggatcattcatggcaatctaga

SEQ ID NO: 6890 - DNA, 218 bp, Artificial sequence
  construct table 2
gtctacggccataccaccctgaacgcgcccgatctcgtctgatctcggaagctaagcagggtcgggcctggttagtacttggatgggagaccgcctgggaataccgggtgctgtaggcgtcgacttgccatgtgtatgtgggtacgaattagattagattaagattagagtacccacatactctgatgatccttcgggatcattcatggcaatctaga

SEQ ID NO: 6891 - DNA, 217 bp, Artificial sequence
  construct table 2
gtctacggccataccaccctgaacgcgcccgatctcgtctgatctcggaagctaagcagggtcgggcctggttagtacttggatgggagaccgcctgggaataccgggtgctgtaggcgtcgacttgccatgtgtatgtgggtacgaagggacggtgcggagaggagagtacccacatactctgatgatccttcgggatcattcatggcaatctaga

SEQ ID NO: 6892 - DNA, 218 bp, Artificial sequence
  construct table 2
gtctacggccataccaccctgaacgcgcccgatctcgtctgatctcggaagctaagcagggtcgggcctggttagtacttggatgggagaccgcctgggaataccgggtgctgtaggcgtcgacttgccatgtgtatgtgggtacgaaggagaggagaggaagaggagagtacccacatactctgatgatccttcgggatcattcatggcaatctaga

SEQ ID NO: 6893 - DNA, 222 bp, Artificial sequence
  construct table 2
gtctacggccataccaccctgaacgcgcccgatctcgtctgatctcggaagctaagcagggtcgggcctggttagtacttggatgggagaccgcctgggaataccgggtgctgtaggcgtcgacttgccatgtgtatgtgggtacgaaggaaggattggtatgtggtatattcgtacccacatactctgatgatccttcgggatcattcatggcaatctaga

SEQ ID NO: 6894 - DNA, 219 bp, Artificial sequence
  construct table 2
gtctacggccataccaccctgaacgcgcccgatctcgtctgatctcggaagctaagcagggtcgggcctggttagtacttggatgggagaccgcctgggaataccgggtgctgtaggcgtcgacttgccatgtgtatgtgggtaccgagggagtggtgaggatgaggcgagtacccacatactctgatgatccttcgggatcattcatggcaatctaga

SEQ ID NO: 6895 - DNA, 196 bp, Artificial sequence
  construct table 2
gtctacggccataccaccctgaacgcgcccgatctcgtctgatctcggaagctaagcagggtcgggcctggttagtagaaagaataccgggtgctgtaggcgtcgacttgccatgtgtatgtgggtaccgagggagtggtgaggatgaggcgagtacccacatactctgatgatccttcgggatcattcatggcaa

SEQ ID NO: 6896 - DNA, 131 bp, Artificial sequence
  construct table 2
gtgctcgcttcggcagcacatatactaaaattggaacgatacagagaagattagcatggcccctaccgagggagtggtgaggatgaggcgagtaggatgacacgcaaattcgtgaagcgttccatattttt

SEQ ID NO: 6897 - DNA, 31 bp, Artificial sequence
  primer
cgctctagattgccatgaatgatcccgaagg

SEQ ID NO: 6898 - DNA, 45 bp, Artificial sequence
  T7 promoter
gccggatcctaatacgactcactatagtctacggccataccaccc

SEQ ID NO: 6899 - DNA, 30 bp, Artificial Sequence
  primer
ggcgtcgacttgccatgtgtatgtgggtac

SEQ ID NO: 6900 - DNA, 37 bp, Artificial Sequence
  primer forw
ctttaatacgactcactataggaacccgcaagccatc

SEQ ID NO: 6901 - DNA, 17 bp, Artificial Sequence
  primer reverse
cagaatctcacacagcc

SEQ ID NO: 6902 - RNA, 36 nt, Artificial sequence
  Mango Aptamer
gcguacgaaggagaggagaggaagaggagaguacgc

SEQ ID NO: 6903 - RNA, 36 nt, Artificial sequence
  Mango Aptamer
gcguacgaaggagaggagagguagaggagaguacgc

SEQ ID NO: 6904 - RNA, 41 nt, Artificial sequence; identical to SEQ ID NO: 6876
  Mango Aptamer

SEQ ID NO: 6905 - RNA, 41 nt, Artificial sequence; identical to SEQ ID NO: 6877
  Mango Aptamer

SEQ ID NO: 6906 - RNA, 41 nt, Artificial sequence; identical to SEQ ID NO: 6878
  Mango Aptamer

SEQ ID NO: 6907 - RNA, 41 nt, Artificial sequence; identical to SEQ ID NO: 6879
  Mango Aptamer

SEQ ID NO: 6908 - RNA, 41 nt, Artificial sequence; identical to SEQ ID NO: 6880
  Mango Aptamer

SEQ ID NO: 6909 - RNA, 41 nt, Artificial sequence; identical to SEQ ID NO: 6881
  Mango Aptamer

SEQ ID NO: 6910 - RNA, 41 nt, Artificial sequence; identical to SEQ ID NO: 6882
  Mango Aptamer

SEQ ID NO: 6911 - RNA, 41 nt, Artificial sequence; identical to SEQ ID NO: 6883
  Mango Aptamer
